(19) United States
(12) Patent Application Publication
(10) Pub. No.: US 2022/0315913 A1
(43) Pub. Date: Oct. 6, 2022

(54) NOVEL CRISPR DNA TARGETING ENZYMES AND SYSTEMS

(71) Applicant: ARBOR BIOTECHNOLOGIES, INC., Cambridge, MA (US)

(72) Inventors: David A. Scott, Cambridge, MA (US); David R. Cheng, Boston, MA (US); Winston X. Yan, Boston, MA (US)

(21) Appl. No.: 17/619,165

(22) PCT Filed: Jun. 12, 2020
(86) PCT No.: PCT/US2020/037585

§ 371 Date: Dec. 14, 2021

Related U.S. Application Data
(60) Provisional application No. 62/861,582, filed on Jun. 14, 2019.
(60) Provisional application No. 62/872,157, filed on Jul. 9, 2019.
(60) Provisional application No. 62/873,606, filed on Jul. 12, 2019.
(60) Provisional application No. 62/873,602, filed on Jul. 12, 2019.

(51) Int. Cl. C12N 15/10; C07K 14/195; C12N 9/22

(52) U.S. Cl. CPC C12N 15/102; C07K 14/195; C12N 9/22; C12N 15/907

(57) ABSTRACT

The disclosure describes novel systems, methods, and compositions for the manipulation of nucleic acids in a targeted fashion. The disclosure describes non-naturally occurring, engineered CRISPR systems, components, and methods for targeted modification of nucleic acids such as DNA. Each system includes one or more protein components and one or more nucleic acid components that together target nucleic acids.

### RELATED APPLICATIONS

[0001] This application claims priority to U.S. Provisional Application 62/861,582 filed on Jun. 14, 2019, U.S. Provisional Application 62/872,157 filed on Jul. 9, 2019, U.S. Provisional Application 62/873,606 filed on Jul. 12, 2019, and U.S. Provisional Application 62/873,602 filed on Jul. 12, 2019, the entire contents of each of which are hereby incorporated by reference.

### SEQUENCE LISTING

[0002] The instant application contains a Sequence Listing which has been submitted electronically in ASCII format and is hereby incorporated by reference in its entirety. Said ASCII copy, created on Jun. 12, 2020, is named A2186-7021WO_SL.txt and is 901,689 bytes in size.

### FIELD OF THE INVENTION

[0003] The present disclosure relates to systems, methods, and compositions used for the control of gene expression involving sequence targeting and nucleic acid editing, which uses vector systems related to Clustered Regularly Interspaced Short Palindromic Repeats (CRISPR) and components thereof.

### BACKGROUND

[0004] Recent application of advances in genome sequencing technologies and analysis have yielded significant insights into the genetic underpinning of biological activities in many diverse areas of nature, ranging from prokaryotic biosynthetic pathways to human pathologies. To fully understand and evaluate the vast quantities of information produced by genetic sequencing technologies, equivalent increases in the scale, efficacy, and ease of technologies for genome and epigenome manipulation are needed. These novel genome and epigenome engineering technologies will accelerate the development of novel applications in numerous areas, including biotechnology, agriculture, and human therapeutics.

[0005] Clustered Regularly Interspaced Short Palindromic Repeats (CRISPR) and the CRISPR-associated (Cas) genes, collectively known as the CRISPR-Cas or CRISPR/Cas systems, are currently understood to provide immunity to bacteria and archaea against phage infection. The CRISPR-Cas systems of prokaryotic adaptive immunity are an extremely diverse group of proteins effectors, non-coding elements, as well as loci architectures, some examples of which have been engineered and adapted to produce important biotechnologies.

[0006] The components of the system involved in host defense include one or more effector proteins capable of modifying DNA or RNA and an RNA guide element that is responsible to targeting these protein activities to a specific sequence on the phage DNA or RNA. The RNA guide is composed of a CRISPR RNA (crRNA) and may require an additional trans-activating RNA (tracrRNA) to enable targeted nucleic acid manipulation by the effector protein(s). The crRNA consists of a direct repeat responsible for protein binding to the crRNA and a spacer sequence that is complementary to the desired nucleic acid target sequence. CRISPR systems can be reprogrammed to target alternative DNA or RNA targets by modifying the spacer sequence of the crRNA.

[0007] CRISPR-Cas systems can be broadly classified into two classes: Class 1 systems are composed of multiple effector proteins that together form a complex around a crRNA, and Class 2 systems consist of a single effector protein that complexes with the crRNA to target DNA or RNA substrates. The single-subunit effector composition of the Class 2 systems provides a simpler component set for engineering and application translation, and have thus far been an important source of programmable effectors. Thus, the discovery, engineering, and optimization of novel Class 2 systems may lead to widespread and powerful programmable technologies for genome engineering and beyond.

[0008] Citation or identification of any document in this application is not an admission that such document is available as prior art to the present invention.

[0009] CRISPR-Cas systems are adaptive immune systems in archaea and bacteria that defend the species against foreign genetic elements. The characterization and engineering of Class 2 CRISPR-Cas systems, exemplified by CRISPR-Cas9, have paved the way for a diverse array of biotechnology applications in genome editing and beyond. Nevertheless, there remains a need for additional programmable effectors and systems for modifying nucleic acids and polynucleotides (i.e., DNA, RNA, or any hybrid, derivative, or modification) beyond the current CRISPR-Cas systems that enable novel applications through their unique properties.

### SUMMARY

[0010] This disclosure provides non-naturally-occurring, engineered systems and compositions for new single-effector Class 2 CRISPR-Cas systems, together with methods for computational identification from genomic databases, development of the natural loci into engineered systems, and experimental validation and application translation. These new effectors are divergent in sequence to orthologs and homologs of existing Class 2 CRISPR effectors, and also have unique domain organizations. They provide additional features that include, but are not limited to, 1) novel DNA/RNA editing properties and control mechanisms, 2) smaller size for greater versatility in delivery strategies, 3) genotype triggered cellular processes such as cell death, and 4) programmable RNA-guided DNA insertion, excision, and mobilization.

[0011] Adding the novel DNA-targeting systems described herein to the toolbox of techniques for genome and epigenome manipulation enables broad applications for specific, programmed perturbations.

[0012] This disclosure relates to new CRISPR-Cas systems including newly discovered enzymes and other components used to create minimal systems that can be used in non-natural environments. e.g., in bacteria other than those in which the system was initially discovered.

[0013] In one aspect, the disclosure provides engineered, non-naturally occurring Clustered Regularly Interspaced Short Palindromic Repeat (CRISPR)-Cas systems of CLUST.121143 including an RNA guide including a direct repeat sequence and a spacer sequence capable of hybridizing to a target nucleic acid, or a nucleic acid encoding the RNA guide; and a CRISPR-associated protein or a nucleic acid encoding the CRISPR-associated protein, where the CRISPR-associated protein includes an amino acid sequence that is at least 80% (e.g., 81%, 82%, 83%, 84%, 85%, 86%, 87%, 88%, 89%, 90%, 91%, 92%, 93%, 94%, 95%, 96%, 97%, 98%, 99% or 100%) identical to an amino acid sequence provided in TABLE 2 (e.g., SEQ ID NOs: 1-17); where the CRISPR-associated protein is capable of binding to the RNA guide and of targeting the target nucleic acid sequence complementary to the spacer sequence. In some embodiments, the CRISPR-associated protein has at least one (e.g., one, two, or three) RuvC domain.

[0014] In some embodiments of any of the systems described herein, the CRISPR associated protein is the CLUST.121143 3300014839 effector protein. In some embodiments, the CRISPR-associated protein is capable of recognizing a protospacer adjacent motif (PAM), and the target nucleic acid including a PAM that includes the nucleic acid sequence 5′-TTG-3′.

[0015] In some embodiments of any of the systems described herein, the direct repeat sequence comprises a nucleotide sequence that is at least 80% (e.g., 81%, 82%, 83%, 84%, 85%, 86%, 87%, 88%, 89%, 90%, 91%, 92%, 93%, 94%, 95%, 96%, 97%, 98%, 99% or 100%) identical to a nucleotide sequence provided in Table 3. In some embodiments of any of the systems described herein, the direct repeat sequence comprises a nucleotide sequence that is provided in Table 3. In some embodiments of any of the systems described herein, the spacer sequence of the RNA guide includes between about 22 to about 40 nucleotides (e.g., 26 to 35 nucleotides).

[0016] In certain embodiments of any of the systems provided herein, the target nucleic acid is a DNA. In some embodiments of any of the systems described herein, the target nucleic acid includes a protospacer adjacent motif (PAM).

[0017] In certain embodiments of any of the systems provided herein, the targeting of the target nucleic acid by the CRISPR-associated protein and RNA guide results in a modification (e.g., a single-stranded or a double-stranded cleavage event) in the target nucleic acid. In some embodiments, the modification results in a deletion event. In some embodiments, the modification results in an insertion event. In some embodiments, the modification results in cell toxicity.

[0018] In some embodiments, the CRISPR associated protein has non-specific (i.e., “collateral”) nuclease (e.g., DNAse or DNAse) activity. In certain embodiments of any of the systems provided herein, the system further includes a donor template nucleic acid (e.g., a DNA or an RNA).

[0019] In some embodiments any of the systems provided herein is within a cell (e.g., a eukaryotic cell (e.g., a mammalian cell) or a prokaryotic cell (e.g., a bacterial cell).

[0020] In some embodiments of any of the systems provided herein, the RNA guide includes a tracrRNA, a modulator RNA, or both. In some embodiments of any of the systems provided herein, the system includes a tracrRNA. In some embodiments of any of the systems provided herein, the system includes a modulator RNA. In some embodiments of any of the systems provided herein, the system does not include a tracrRNA.

[0021] In some embodiments of any of the systems provided herein, the CRISPR-associated protein comprises a split RuvC domain. In some embodiments, the CRISPR-associated protein comprises a catalytic residue (e.g., aspartic acid or glutamic acid). In some embodiments, the CRISPR-associated protein cleaves the target nucleic acid. In some embodiments, the CRISPR-associated protein further comprises a peptide tag, a fluorescent protein, a base-editing domain, a DNA methylation domain, a histone residue modification domain, a localization factor, a transcription modification factor, a light-gated control factor, a chemically inducible factor, or a chromatin visualization factor. In some embodiments, the nucleic acid encoding the CRISPR-associated protein is codon-optimized for expression in a cell. In some embodiments, the nucleic acid encoding the CRISPR-associated protein is operably linked to a promoter. In some embodiments, the nucleic acid encoding the CRISPR-associated protein is in a vector. In some embodiments, the vector comprises a retroviral vector, a lentiviral vector, a phage vector, an adenoviral vector, an adeno-associated vector, or a herpes simplex vector. In some embodiments, the system is present in a delivery composition comprising a nanoparticle, a liposome, an exosome, a microvesicle, or a gene-gun.

[0022] In another aspect, the disclosure provides a method of binding a system described herein to a target nucleic acid in a cell, where the method comprises: (a) providing the system; and (b) delivering the system to the cell, wherein the cell comprises the target nucleic acid, wherein the CRISPR-associated protein binds to the RNA guide, and wherein the spacer sequence binds to the target nucleic acid.

[0023] In another aspect, the disclosure provides methods of targeting and editing a target nucleic acid including contacting the target nucleic acid with any of the systems described herein. In another aspect, the disclosure provides methods of editing a target nucleic acid including contacting the target nucleic acid with any of the systems described herein.

[0024] In one aspect, the disclosure provides engineered, non-naturally occurring Clustered Regularly Interspaced Short Palindromic Repeat (CRISPR)-Cas systems of CLUST.196682 including: an RNA guide including a direct repeat sequence and a spacer sequence capable of hybridizing to a target nucleic acid, or a nucleic acid encoding the RNA guide; and a CRISPR-associated protein or a nucleic acid encoding the CRISPR-associated protein, where the CRISPR-associated protein includes an amino acid sequence that is at least 80% (e.g., 81%, 82%, 83%, 84%, 85%, 86%, 87%, 88%, 89%, 90%, 91%, 92%, 93%, 94%, 95%, 96%, 97%, 98%, 99% or 100%) identical to an amino acid sequence provided in Table 8; where the CRISPR-associated protein is capable of binding to the RNA guide and of targeting the target nucleic acid sequence complementary to the spacer sequence.

[0025] In some embodiments of any of the systems described herein, the CRISPR-associated protein includes at least one (e.g., one, two, or three) RuvC domain.

[0026] In some embodiments of any of the systems described herein, the direct repeat sequence includes a nucleotide sequence that is at least 80% (e.g., 81%, 82%, 83%, 84%, 85%, 86%, 87%, 88%, 89%, 90%, 91%, 92%, 93%, 94%, 95%, 96%, 97%, 98%, 99% or 100%) identical to a nucleotide sequence provided in Table 9. In some embodiments of any of the systems described herein, the direct repeat sequence includes a nucleotide sequence that is provided in Table 9.

[0027] In some embodiments of any of the systems described herein, the CRISPR-associated protein is a CLUST.196682 3300025638 effector protein. In some embodiments of any of the systems described herein, the CRISPR-associated protein is capable of recognizing a protospacer adjacent motif (PAM), and the target nucleic acid includes a PAM including the nucleic acid sequence 5′-CG-3′.

[0028] In some embodiments of any of the systems described herein, the spacer sequence of the RNA guide includes between about 17 nucleotides to about 44 nucleotides. In some embodiments of any of the systems described herein, the spacer sequence of the RNA guide includes between 26 and 38 nucleotides.

[0029] In some embodiments of any of the systems described herein, the target nucleic acid is a DNA. In some embodiments of any of the systems described herein, the target nucleic acid includes a PAM. In some embodiments of any of the systems described herein, the CRISPR associated protein has non-specific nuclease activity.

[0030] In some embodiments of any of the systems described herein, the targeting of the target nucleic acid by the CRISPR-associated protein and RNA guide results in a modification in the target nucleic acid. In some embodiments of any of the systems described herein, the modification in the target nucleic acid is a double-stranded cleavage event or a single-stranded cleavage event. In some embodiments of any of the systems described herein, the modification in the target nucleic acid results in an insertion event or a deletion event. In some embodiments of any of the systems described herein, the modification results in cell toxicity or cell death.

[0031] In some embodiments of any of the systems described herein, the systems further include a donor template nucleic acid. In some embodiments of any of the systems described herein, the donor template nucleic acid is a DNA or an RNA.

[0032] In some embodiments of any of the systems described herein, the RNA guide includes a tracrRNA, a modulator RNA, or both. In some embodiments of any of the systems described herein, the systems further include a tracrRNA and/or a modulator RNA. In some embodiments of any of the systems provided herein, the system does not include a tracrRNA.

[0033] In some embodiments of any of the systems described herein, the systems are within a cell. In some embodiments of any of the systems described herein, the systems are within a eukaryotic cell or a prokaryotic cell.

[0034] In some embodiments of any of the systems provided herein, the CRISPR-associated protein comprises a split RuvC domain. In some embodiments, the CRISPR-associated protein comprises a catalytic residue (e.g., aspartic acid or glutamic acid). In some embodiments, the CRISPR-associated protein cleaves the target nucleic acid. In some embodiments, the CRISPR-associated protein further comprises a peptide tag, a fluorescent protein, a base-editing domain, a DNA methylation domain, a histone residue modification domain, a localization factor, a transcription modification factor, a light-gated control factor, a chemically inducible factor, or a chromatin visualization factor. In some embodiments, the nucleic acid encoding the CRISPR-associated protein is codon-optimized for expression in a cell. In some embodiments, the nucleic acid encoding the CRISPR-associated protein is operably linked to a promoter. In some embodiments, the nucleic acid encoding the CRISPR-associated protein is in a vector. In some embodiments, the vector comprises a retroviral vector, a lentiviral vector, a phage vector, an adenoviral vector, an adeno-associated vector, or a herpes simplex vector. In some embodiments, the system is present in a delivery composition comprising a nanoparticle, a liposome, an exosome, a microvesicle, or a gene-gun.

[0035] In another aspect, the disclosure provides a method of binding a system described herein to a target nucleic acid in a cell, where the method comprises: (a) providing the system; and (b) delivering the system to the cell, wherein the cell comprises the target nucleic acid, wherein the CRISPR-associated protein binds to the RNA guide, and wherein the spacer sequence binds to the target nucleic acid.

[0036] In one aspect, the disclosure provides methods of targeting and editing a target nucleic acid, the methods including contacting the target nucleic acid with any of the systems described herein. In one aspect, the disclosure provides methods of editing a target nucleic acid, the methods including contacting the target nucleic acid with any of the systems described herein.

[0037] In one aspect, the disclosure provides methods of targeting the insertion of a payload nucleic acid at a site of a target nucleic acid, the methods including contacting the target nucleic acid with a system described herein.

[0038] In one aspect, the disclosure provides engineered, non-naturally occurring Clustered Regularly Interspaced Short Palindromic Repeat (CRISPR)-Cas systems of CLUST.089537 including: an RNA guide including a direct repeat sequence and a spacer sequence capable of hybridizing to a target nucleic acid, or a nucleic acid encoding the RNA guide; and a CRISPR-associated protein or a nucleic acid encoding the CRISPR-associated protein, where the CRISPR-associated protein includes an amino acid sequence that is at least 80% (e.g., 81%, 82%, 83%, 84%, 85%, 86%, 87%, 88%, 89%, 90%, 91%, 92%, 93%, 94%, 95%, 96%, 97%, 98%, 99% or 100%) identical to an amino acid sequence provided in Table 12; where the CRISPR-associated protein is capable of binding to the RNA guide and of targeting the target nucleic acid sequence complementary to the spacer sequence.

[0039] CLUST.089537 and CLUST.085589 can be used interchangeably.

[0040] In some embodiments of any of the systems described herein, the CRISPR-associated protein includes at least one (e.g., one, two, or three) RuvC domain.

[0041] In some embodiments of any of the systems described herein, the direct repeat sequence includes a nucleotide sequence that is at least 80% (e.g., 81%, 82%, 83%, 84%, 85%, 86%, 87%, 88%, 89%, 90%, 91%, 92%, 93%, 94%, 95%, 96%, 97%, 98%, 99% or 100%) identical to a nucleotide sequence provided in Table 13. In some embodiments of any of the systems described herein, the direct repeat sequence includes a nucleotide sequence that is provided in Table 13.

[0042] In some embodiments of any of the systems described herein, the CRISPR-associated protein is a CLUST.089537 CAAACX010000652 effector protein. In some embodiments of any of the systems described herein, the CRISPR-associated protein is capable of recognizing a protospacer adjacent motif (PAM), and the target nucleic acid includes a PAM including the nucleic acid sequence 5′-TTC-3′.

[0043] In some embodiments of any of the systems described herein, the spacer sequence of the RNA guide includes between about 20 nucleotides to about 40 nucleotides. In some embodiments of any of the systems described herein, the spacer sequence of the RNA guide includes between 25 and 37 nucleotides.

[0044] In some embodiments of any of the systems described herein, the target nucleic acid is a DNA. In some embodiments of any of the systems described herein, the target nucleic acid includes a PAM. In some embodiments of any of the systems described herein, the CRISPR associated protein has non-specific nuclease activity.

[0045] In some embodiments of any of the systems described herein, the targeting of the target nucleic acid by the CRISPR-associated protein and RNA guide results in a modification in the target nucleic acid. For example, in any of the systems described herein, the modification in the target nucleic acid is a double-stranded cleavage event. In other embodiments of any of the systems described herein, the modification in the target nucleic acid is a single-stranded cleavage event, an insertion event, or a deletion event. In some embodiments of any of the systems described herein, the modification results in cell toxicity or cell death.

[0046] In some embodiments of any of the systems described herein, the systems further include a donor template nucleic acid. For example, the donor template nucleic acid can be a DNA or an RNA.

[0047] In some embodiments of any of the systems described herein, the RNA guide includes a tracrRNA, a modulator RNA, or both. In some embodiments of any of the systems described herein, the systems further include a tracrRNA and/or a modulator RNA. In some embodiments of any of the systems provided herein, the system does not include a tracrRNA.

[0048] In some embodiments of any of the systems described herein, the systems are within a cell, e.g., a eukaryotic cell or a prokaryotic cell.

[0049] In some embodiments of any of the systems provided herein, the CRISPR-associated protein comprises a split RuvC domain. In some embodiments, the CRISPR-associated protein comprises a catalytic residue (e.g., aspartic acid or glutamic acid). In some embodiments, the CRISPR-associated protein cleaves the target nucleic acid. In some embodiments, the CRISPR-associated protein further comprises a peptide tag, a fluorescent protein, a base-editing domain, a DNA methylation domain, a histone residue modification domain, a localization factor, a transcription modification factor, a light-gated control factor, a chemically inducible factor, or a chromatin visualization factor. In some embodiments, the nucleic acid encoding the CRISPR-associated protein is codon-optimized for expression in a cell. In some embodiments, the nucleic acid encoding the CRISPR-associated protein is operably linked to a promoter. In some embodiments, the nucleic acid encoding the CRISPR-associated protein is in a vector. In some embodiments, the vector comprises a retroviral vector, a lentiviral vector, a phage vector, an adenoviral vector, an adeno-associated vector, or a herpes simplex vector. In some embodiments, the system is present in a delivery composition comprising a nanoparticle, a liposome, an exosome, a microvesicle, or a gene-gun.

[0050] In another aspect, the disclosure provides a method of binding a system described herein to a target nucleic acid in a cell, where the method comprises: (a) providing the system; and (b) delivering the system to the cell, wherein the cell comprises the target nucleic acid, wherein the CRISPR-associated protein binds to the RNA guide, and wherein the spacer sequence binds to the target nucleic acid.

[0051] In one aspect, the disclosure provides methods of targeting and editing a target nucleic acid, the methods including contacting the target nucleic acid with any of the systems described herein. In one aspect, the disclosure provides methods of editing a target nucleic acid, the methods including contacting the target nucleic acid with any of the systems described herein.

[0052] In some embodiments of any of the systems provided herein, the contacting comprises directly contacting or indirectly contacting. In some embodiments of any of the systems provided herein, contacting indirectly comprises administering one or more nucleic acids encoding an RNA guide or CRISPR-associated protein described herein under conditions that allow for production of the RNA guide and/or CRISPR-related protein. In some embodiments of any of the systems provided herein, contacting includes contacting in vivo or contacting in vitro. In some embodiments of any of the systems provided herein, contacting a target nucleic acid with the system comprises contacting a cell comprising the nucleic acid with the system under conditions that allow the CRISPR-related protein and guide RNA to reach the target nucleic acid. In some embodiments of any of the systems provided herein, contacting a cell in vivo with the system comprises administering the system to the subject that comprises the cell, under conditions that allow the CRISPR-related protein and guide RNA to reach the cell or be produced in the cell.

### BRIEF FIGURE DESCRIPTION

[0053] The figures are a series of schematics and nucleic acid and amino acid sequences that represent the results of locus analysis of various protein clusters.

[0054] FIG. 1 is a schematic sequence representation that shows conserved effector (e_A) and CRISPR array elements for representative CLUST.121143 loci.

[0055] FIG. 2 is a series of sequences that show the multiple sequence alignment of examples of CRISPR direct repeat elements for CLUST.121143. FIG. 2 discloses SEQ ID NOs: 825, 101, 101, 101, 101, 101, 101, 106, 106, 106, 106, 102, 103, 103, 104, 104, 104, 107, 107, 107, 107, 107, 107, 108, 108, 108, 108, 108, 108, 108, 110, 109 and 105, respectively, in order of appearance.

[0056] FIG. 3 is a schematic representation of a phylogenetic tree of CLUST.121143 effector proteins.

[0057] FIG. 4 is a schematic representation of a multiple sequence alignment of CLUST.121143 effector proteins, with the locations of the conserved catalytic residues of the RuvC domain indicated; and the conserved catalytic residues of Zinc finger domain indicated.

[0058] FIG. 5 is a graph that shows the degree of depletion activity of the engineered compositions for spacers targeting pACYC184 and direct repeat transcriptional orientations. To quantify depletion, an enrichment ratio was calculated as R_{treated}/Rᵢₙₚᵤₜ for each direct repeat and spacer. The normalized input read count is computed as:

Rᵢₙₚᵤₜ=# reads containing DR+spacer/total reads

where the reads counts are obtained from next-generation sequencing of the plasmid DNA library expressing a CLUST.121143 effector and associated crRNA prior to transformation. The normalized treated read count is computed as:

R_{treated}=(1+# reads containing DR+spacer)/total # reads

where the read counts are obtained from next-generation sequencing of the plasmid DNA extracted from the surviving cells expressing CLUST.121143 effector and associated crRNA after antibiotic screening. A strongly depleted target has an enrichment less than 1/10. The degree of depletion for CLUST.121143 3300014839 with the direct repeat in the “forward” orientation (5′-CTTT . . . AGAG-[spacer]-3′) and with the direct repeat in the “reverse” orientation (5′-CTCT . . . AAAG-[spacer]-3′) are depicted in the figure.

[0059] FIG. 6 is a graph that shows the degree of depletion activity for the negative control, in which the screen is repeated with the sequence encoding the CLUST.121143 effector is deleted from the effector plasmid.

[0060] FIGS. 7A and 7B are graphic representations that show the density of depleted and non-depleted targets for CLUST.121143 3300014839 by location on the pACYC184 plasmid and E. coli strain E. Cloni. Targets on the top strand and bottom strand are shown separately, and in relation to the orientation of the annotated genes. FIGS. 7A and 7B both disclose SEQ ID NO: 826.

[0061] FIG. 8 is a weblogo of the sequences flanking depleted targets for CLUST.121143 3300014839. FIG. 8 discloses SEQ ID NO: 826.

[0062] FIG. 9 is a schematic sequence representation that shows conserved effector (e_A) and CRISPR array elements for representative CLUST.196682 loci.

[0063] FIG. 10 is a series of sequences that show multiple sequence alignment of examples of CRISPR direct repeat elements for CLUST.196682. FIG. 10 discloses SEQ ID NOs: 827, 714, 714, 714, 733, 701, 704, 705, 705, 703, 734, 706, 743, 720, 720, 740, 740, 731, 731, 742, 742, 828, 732, 730, 730 and 741, respectively, in order of appearance.

[0064] FIG. 11 is a schematic representation of a phylogenetic tree of CLUST.196682 effector proteins.

[0065] FIG. 12 is a schematic representation of a multiple sequence alignment of CLUST.196682 effector proteins, with the locations of the conserved catalytic residues of the RuvC domain indicated; and the conserved catalytic residues of Zinc finger domain indicated.

[0066] FIGS. 13A and 13B are graphic representations that show the density of depleted and non-depleted targets for CLUST.196682 3300025638 by location on the pACYC184 plasmid and E. coli strain E. Cloni. Targets on the top strand and bottom strand are shown separately, and in relation to the orientation of the annotated genes. FIGS. 13A and 13B both disclose SEQ ID NO: 829.

[0067] FIG. 14 is a weblogo of the sequences flanking depleted targets for CLUST.196682 3300025638. FIG. 14 discloses SEQ ID NO: 829.

[0068] FIG. 15 is a schematic sequence representation that shows conserved effector (e_A) and CRISPR array elements for representative CLUST.089537 loci.

[0069] FIG. 16 is a series of sequences that show multiple sequence alignment of examples of CRISPR direct repeat elements for CLUST.089537. FIG. 16 discloses SEQ ID NOs: 830, 402, 429, 403, 419, 431, 436, 432, 441, 404, 455, 446, 447, 411, 414, 415, 440, 437, 438, 430, 412, 425, 448, 452, 406, 407, 422, 442, 443, 424, 409, 413, 420, 418, 426, 444, 416, 445, 434, 401, 410, 449, 454, 417, 427, 423, 450, 428, 439, 435, 453, 421, 408, 405, 433 and 451, respectively, in order of appearance.

[0070] FIG. 17 is a schematic representation of a phylogenetic tree of CLUST.089537 effector proteins.

[0071] FIG. 18 is a schematic representation of a multiple sequence alignment of CLUST.089537 effector proteins, with the locations of the conserved catalytic residues of the RuvC domain indicated; and the conserved catalytic residues of Zinc finger domain indicated.

[0072] FIG. 19 is a graph that shows the degree of depletion activity of the engineered compositions for spacers targeting pACYC184 and direct repeat transcriptional orientations. To quantify depletion, an enrichment ratio was calculated as R_{treated}/Rᵢₙₚᵤₜ for each direct repeat and spacer. The normalized input read count is computed as:

Rᵢₙₚᵤₜ=# reads containing DR+spacer/total reads

where the reads counts are obtained from next-generation sequencing of the plasmid DNA library expressing a CLUST.089537 effector and associated crRNA prior to transformation. The normalized treated read count is computed as:

R_{treated}=(1+# reads containing DR+spacer)/total # reads

where the read counts are obtained from next-generation sequencing of the plasmid DNA extracted from the surviving cells expressing CLUST.089537 effector and associated crRNA after antibiotic screening. A strongly depleted target has an enrichment less than 1/10. The degree of depletion for CLUST.089537 CAAACX010000652 with the direct repeat in the “forward” orientation (5′-GTGC . . . ACAG-[spacer]-3′) and with the direct repeat in the “reverse” orientation (5′-CTGT . . . GCAC-[spacer]-3′) are depicted in the figure.

[0073] FIGS. 20A and 20B are graphic representations that show the density of depleted and non-depleted targets for CLUST.089537 CAAACX010000652 by location on the pACYC184 plasmid and E. coli strain E. Cloni. Targets on the top strand and bottom strand are shown separately, and in relation to the orientation of the annotated genes. FIGS. 20A and 20B both disclose SEQ ID NO: 831.

[0074] FIG. 21 is a weblogo of the sequences flanking depleted targets for CLUST.089537 CAAACX010000652. FIG. 21 discloses SEQ ID NO: 831.

### DETAILED DESCRIPTION

[0075] The broad natural diversity of CRISPR-Cas defense systems contains a wide range of activity mechanisms and functional elements that can be harnessed for programmable biotechnologies. In a natural system, these mechanisms and parameters enable efficient defense against foreign DNA and viruses while providing self vs. non-self discrimination to avoid self-targeting. In an engineered system, the same mechanisms and parameters also provide a diverse toolbox of molecular technologies and define the boundaries of the targeting space. For instance, systems Cas9 and Cas13a have canonical DNA and RNA endonuclease activity and their targeting spaces are defined by the protospacer adjacent motif (PAM) on targeted DNA and protospacer flanking sites (PFS) on targeted RNA, respectively.

[0076] The methods described herein have been used to discover additional mechanisms and parameters within single subunit Class 2 effector systems that can expand the capabilities of RNA-programmable nucleic acid manipulation.

[0077] In one aspect, the disclosure relates to the use of computational methods and algorithms to search for and identify novel protein families that exhibit a strong co-occurrence pattern with certain other features within naturally occurring genome sequences. In certain embodiments, these computational methods are directed to identifying protein families that co-occur in close proximity to CRISPR arrays. However, the methods disclosed herein are useful in identifying proteins that naturally occur within close proximity to other features, both non-coding and protein-coding (e.g., fragments of phage sequences in non-coding areas of bacterial loci; or CRISPR Cas1 proteins). It is understood that the methods and calculations described herein may be performed on one or more computing devices.

[0078] In some embodiments, a set of genomic sequences is obtained from genomic or metagenomic databases. The databases comprise short reads, or contig level data, or assembled scaffolds, or complete genomic sequences of organisms. Likewise, the database may comprise genomic sequence data from prokaryotic organisms, or eukaryotic organisms, or may include data from metagenomic environmental samples. Examples of database repositories include the National Center for Biotechnology Information (NCBI) RefSeq, NCBI GenBank, NCBI Whole Genome Shotgun (WGS), and the Joint Genome Institute (JGI) Integrated Microbial Genomes (IMG).

[0079] In some embodiments, a minimum size requirement is imposed to select genome sequence data of a specified minimum length. In certain exemplary embodiments, the minimum contig length may be 100 nucleotides, 500 nt, 1 kb, 1.5 kb, 2 kb, 3 kb, 4 kb, 5 kb, 10 kb, 20 kb, 40 kb, or 50 kb.

[0080] In some embodiments, known or predicted proteins are extracted from the complete or a selected set of genome sequence data. In some embodiments, known or predicted proteins are taken from extracting coding sequence (CDS) annotations provided by the source database. In some embodiments, predicted proteins are determined by applying a computational method to identify proteins from nucleotide sequences. In some embodiments, the GeneMark Suite is used to predict proteins from genome sequences. In some embodiments, Prodigal is used to predict proteins from genome sequences. In some embodiments, multiple protein prediction algorithms may be used over the same set of sequence data with the resulting set of proteins de-duplicated.

[0081] In some embodiments, CRISPR arrays are identified from the genome sequence data. In some embodiments, PILER-CR is used to identify CRISPR arrays. In some embodiments, CRISPR Recognition Tool (CRT) is used to identify CRISPR arrays. In some embodiments, CRISPR arrays are identified by a heuristic that identifies nucleotide motifs repeated a minimum number of times (e.g., 2, 3, or 4 times), where the spacing between consecutive occurrences of a repeated motif does not exceed a specified length (e.g., 50, 100, or 150 nucleotides). In some embodiments, multiple CRISPR array identification tools may be used over the same set of sequence data with the resulting set of CRISPR arrays de-duplicated.

[0082] In some embodiments, proteins in close proximity to CRISPR arrays are identified. In some embodiments, proximity is defined as a nucleotide distance, and may be within 20 kb, 15 kb, or 5 kb. In some embodiments, proximity is defined as the number of open reading frames (ORFs) between a protein and a CRISPR array, and certain exemplary distances may be 10, 5, 4, 3, 2, 1, or 0 ORFs. The proteins identified as being within close proximity to a CRISPR array are then grouped into clusters of homologous proteins. In some embodiments, blastclust is used to form protein clusters. In certain other embodiments, mmseqs2 is used to form protein clusters.

[0083] To establish a pattern of strong co-occurrence between the members of a protein cluster with CRISPR arrays, a BLAST search of each member of the protein family may be performed over the complete set of known and predicted proteins previously compiled. In some embodiments, UBLAST or mmseqs2 may be used to search for similar proteins. In some embodiments, a search may be performed only for a representative subset of proteins in the family.

[0084] In some embodiments, the clusters of proteins within close proximity to CRISPR arrays are ranked or filtered by a metric to determine co-occurrence. One exemplary metric is the ratio of the number of elements in a protein cluster against the number of BLAST matches up to a certain E value threshold. In some embodiments, a constant E value threshold may be used. In other embodiments, the E value threshold may be determined by the most distant members of the protein cluster. In some embodiments, the global set of proteins is clustered and the co-occurrence metric is the ratio of the number of elements of the CRISPR associated cluster against the number of elements of the containing global cluster(s).

[0085] In some embodiments, a manual review process is used to evaluate the potential functionality and the minimal set of components of an engineered system based on the naturally occurring locus structure of the proteins in the cluster. In some embodiments, a graphical representation of the protein cluster may assist in the manual review, and may contain information including pairwise sequence similarity, phylogenetic tree, source organisms/environments, predicted functional domains, and a graphical depiction of locus structures. In some embodiments, the graphical depiction of locus structures may filter for nearby protein families that have a high representation. In some embodiments, representation may be calculated by the ratio of the number of related nearby proteins against the size(s) of the containing global cluster(s). In certain exemplary embodiments, the graphical representation of the protein cluster may contain a depiction of the CRISPR array structures of the naturally occurring loci. In some embodiments, the graphical representation of the protein cluster may contain a depiction of the number of conserved direct repeats versus the length of the putative CRISPR array, or the number of unique spacer sequences versus the length of the putative CRISPR array. In some embodiments, the graphical representation of the protein cluster may contain a depiction of various metrics of co-occurrence of the putative effector with CRISPR arrays predict new CRISPR-Cas systems and identify their components.

[0086] In some embodiments, a complex between an RNA guide and a CRISPR-associated protein described herein is an activated CRISPR complex that has bound to or has modified a target nucleic acid.

### Definitions

[0087] The term “cleavage event,” as used herein, refers to a DNA break in a target nucleic acid created by a nuclease of a CRISPR system described herein. In some embodiments, the cleavage event is a double-stranded DNA break. In some embodiments, the cleavage event is a single-stranded DNA break.

[0088] The term “CRISPR-Cas system” as used herein refers to nucleic acids and/or proteins involved in the expression of, or directing the activity of, CRISPR-Cas effectors, including sequences encoding CRISPR-Cas effectors, RNA guides, and other sequences and transcripts from a CRISPR locus.

[0089] The term “CRISPR array” as used herein refers to the nucleic acid (e.g., DNA) segment that includes CRISPR repeats and spacers, starting with the first nucleotide of the first CRISPR repeat and ending with the last nucleotide of the last (terminal) CRISPR repeat. Typically, each spacer in a CRISPR array is located between two repeats. The term “CRISPR repeat,” or “CRISPR direct repeat,” or “direct repeat,” as used herein, refers to multiple short direct repeating sequences, which show very little or no sequence variation within a CRISPR array.

[0090] The term “CRISPR RNA” or “crRNA” as used herein refers to an RNA molecule comprising a guide sequence used by a CRISPR effector to specifically target a nucleic acid sequence. Typically, crRNAs contain a sequence that mediates target recognition and a sequence that forms a duplex with a tracrRNA. The crRNA: tracrRNA duplex binds to a CRISPR effector. The term “donor template nucleic acid,” as used herein refers to a nucleic acid molecule that can be used by one or more cellular proteins to alter the structure of a target nucleic acid after a CRISPR enzyme described herein has altered a target nucleic acid. In some embodiments, the donor template nucleic acid is a double-stranded nucleic acid. In some embodiments, the donor template nucleic acid is a single-stranded nucleic acid. In some embodiments, the donor template nucleic acid is linear. In some embodiments, the donor template nucleic acid is circular (e.g., a plasmid). In some embodiments, the donor template nucleic acid is an exogenous nucleic acid molecule. In some embodiments, the donor template nucleic acid is an endogenous nucleic acid molecule (e.g., a chromosome).

[0091] The term “CRISPR-Cas effector,” “CRISPR effector,” “effector,” “CRISPR-associated protein,” or “CRISPR enzyme” as used herein refers to a protein that carries out an enzymatic activity or that binds to a target site on a nucleic acid specified by an RNA guide. In some embodiments, a CRISPR effector has endonuclease activity, nickase activity, exonuclease activity, transposase activity, and/or excision activity.

[0092] The term “guide RNA” or “gRNA” as used herein refers to an RNA molecule capable of directing a CRISPR effector having nuclease activity to target and cleave a specified target nucleic acid.

[0093] The term “RNA guide” as used herein refers to any RNA molecule that facilitates the targeting of a protein described herein to a target nucleic acid. Exemplary “RNA guides” include, but are not limited to, crRNAs, as well as crRNAs fused to either tracrRNAs and/or modulator RNAs. In some embodiments, an RNA guide includes both a crRNA and a tracrRNA. In some embodiments, an RNA guide includes a crRNA and a modulator RNA. In some embodiments, an RNA guide includes a crRNA, a tracrRNA, and a modulator RNA.

[0094] The term “modulator RNA” as described herein refers to any RNA molecule that modulates (e.g., increases or decreases) an activity of a CRISPR-Cas effector or a nucleoprotein complex that includes a CRISPR-Cas effector. In some embodiments, a modulator RNA modulates a nuclease activity of a CRISPR-Cas effector or a nucleoprotein complex that includes a CRISPR-Cas effector.

[0095] As used herein, the term “target nucleic acid” refers to a specific nucleic acid sequence that is to be modified by a CRISPR system described herein. In some embodiments, the target nucleic acid comprises a gene. In some embodiments, the target nucleic acid comprises a non-coding region (e.g., a promoter). In some embodiments, the target nucleic acid is single-stranded. In some embodiments, the target nucleic acid is double-stranded.

[0096] The terms “trans-activating crRNA” or “tracrRNA” as used herein refer to an RNA including a sequence that forms a structure required for a CRISPR effector to bind to a specified target nucleic acid.

[0097] A “transcriptionally-active site” as used herein refers to a site in a nucleic acid sequence comprising promoter regions at which transcription is initiated and actively occurring.

[0098] The term “collateral RNAse activity,” as used herein in reference to a CRISPR enzyme, refers to non-specific RNAse activity of a CRISPR enzyme after the enzyme has modified a specifically targeted nucleic acid.

[0099] Unless otherwise defined, all technical and scientific terms used herein have the same meaning as commonly understood by one of ordinary skill in the art to which this invention belongs. Although methods and materials similar or equivalent to those described herein can be used in the practice or testing of the present invention, suitable methods and materials are described below. All publications, patent applications, patents, and other references mentioned herein are incorporated by reference in their entirety. In case of conflict, the present specification, including definitions, will control. In addition, the materials, methods, and examples are illustrative only and not intended to be limiting.

[0100] Other features and advantages of the invention will be apparent from the following detailed description, and from the claims.

### Pooled-Screening

[0101] To efficiently validate the activity of the engineered novel CRISPR-Cas systems and simultaneously evaluate in an unbiased manner different activity mechanisms and functional parameters, a new pooled-screening approach in E. coli. First, from the computational identification of the conserved protein and noncoding elements of the novel CRISPR-Cas system. DNA synthesis and molecular cloning was used to assemble the separate components into a single artificial expression vector, which in one embodiment is based on a pET-28a+ backbone. In a second embodiment, the effectors and noncoding elements are transcribed on a single mRNA transcript, and different ribosomal binding sites are used to translate individual effectors.

[0102] Second, the natural crRNA and targeting spacers were replaced with a library of unprocessed crRNAs containing non-natural spacers targeting a second plasmid, pACYC184. This crRNA library was cloned into the vector backbone containing the protein effectors and noncoding elements (e.g., pET-28a+), and then subsequently transformed the library into E. coli along with the pACYC184 plasmid target. Consequently, each resulting E. coli cell contains no more than one targeting spacer. In an alternate embodiment, the library of unprocessed crRNAs containing non-natural spacers additionally target E. coli essential genes, drawn from resources such as those described in Baba et al. (2006) Mol. Syst. Biol. 2: 2006.0008; and Gerdes et al. (2003) J. Bacteriol. 185(19): 5673-84, the entire contents of each of which are incorporated herein by reference. In this embodiment, positive, targeted activity of the novel CRISPR-Cas systems that disrupts essential gene function results in cell death or growth arrest. In some embodiments, the essential gene targeting spacers can be combined with the pACYC184 targets to add another dimension to the assay.

[0103] Third, the E. coli were grown under antibiotic selection. In one embodiment, triple antibiotic selection is used: kanamycin for ensuring successful transformation of the pET-28a+ vector containing the engineered CRISPR-Cas effector system, and chloramphenicol and tetracycline for ensuring successful co-transformation of the pACYC184 target vector. Since pACYC184 normally confers resistance to chloramphenicol and tetracycline, under antibiotic selection, positive activity of the novel CRISPR-Cas system targeting the plasmid will eliminate cells that actively express the effectors, noncoding elements, and specific active elements of the crRNA library. Examining the population of surviving cells at a later time point compared to an earlier time point results in a depleted signal compared to the inactive crRNAs. In some embodiments, double antibiotic selection is used. For example, withdrawal of either chloramphenicol or tetracycline to remove selective pressure can provide novel information about the targeting substrate, sequence specificity, and potency. In some embodiments, only kanamycin is used to ensure successful transformation of the pET-28a+ vector containing the engineered CRISPR-Cas effector system. This embodiment is suitable for libraries containing spacers targeting E. coli essential genes, as no additional selection beyond kanamycin is needed to observe growth alterations. In this embodiment, chloramphenicol and tetracycline dependence is removed, and their targets (if any) in the library provides an additional source of negative or positive information about the targeting substrate, sequence specificity, and potency.

[0104] Since the pACYC184 plasmid contains a diverse set of features and sequences that may affect the activity of a CRISPR-Cas system, mapping the active crRNAs from the pooled screen onto pACYC184 provides patterns of activity that can be suggestive of different activity mechanisms and functional parameters in a broad, hypothesis-agnostic manner. In this way, the features required for reconstituting the novel CRISPR-Cas system in a heterologous prokaryotic species can be more comprehensively tested and studied.

[0105] The key advantages of the in vivo pooled-screen described herein include:

[0106] (1) Versatility—Plasmid design allows multiple effectors and/or noncoding elements to be expressed; library cloning strategy enables both transcriptional directions of the computationally predicted crRNA to be expressed;

[0107] (2) Comprehensive tests of activity mechanisms & functional parameters—Evaluates diverse interference mechanisms, including DNA or RNA cleavage; examines co-occurrence of features such as transcription, plasmid DNA replication; and flanking sequences for crRNA library can be used to reliably determine PAMs with complexity equivalence of 4N's;

[0108] (3) Sensitivity—pACYC184 is a low copy plasmid, enabling high sensitivity for CRISPR-Cas activity since even modest interference rates can eliminate the antibiotic resistance encoded by the plasmid; and

[0109] (4) Efficiency—Optimized molecular biology steps to enable greater speed and throughput RNA-sequencing and protein expression samples can be directly harvested from the surviving cells in the screen.

[0110] The novel CRISPR-Cas families described herein were evaluated using this in vivo pooled-screen to evaluate their operational elements, mechanisms and parameters, as well as their ability to be active and reprogrammed in an engineered system outside of their natural cellular environment.

### Class 2 CRISPR-Cas Effectors Having a RuvC Domain

[0111] In one aspect, the disclosure provides a Class 2 CRISPR-Cas systems referred to herein as CLUST.121143. This Class 2 CRISPR-Cas system contains an isolated CRISPR-associated protein having a RuvC domain.

[0112] In one aspect, the disclosure provides a Class 2 CRISPR-Cas systems referred to herein as CLUST.196682. This Class 2 CRISPR-Cas system contains an isolated CRISPR-associated protein having a RuvC domain.

[0113] In one aspect, the disclosure provides a Class 2 CRISPR-Cas systems referred to herein as CLUST.089537. This Class 2 CRISPR-Cas system contains an isolated CRISPR-associated protein having a RuvC domain.

[0114] In some embodiments, the CRISPR-associated protein and the RNA guide form a “binary” complex that may include other components. The binary complex is activated upon binding to a nucleic acid substrate that is complementary to a spacer sequence in the RNA guide (i.e., a sequence-specific substrate or target nucleic acid). In some embodiments, the sequence-specific substrate is a double-stranded DNA. In some embodiments, the sequence-specific substrate is a single-stranded DNA. In some embodiments, the sequence-specific substrate is a single-stranded RNA. In some embodiments, the sequence-specific substrate is a double-stranded RNA. In some embodiments, the sequence-specificity requires a complete match of the spacer sequence in the RNA guide (e.g., crRNA) to the target substrate. In other embodiments, the sequence specificity requires a partial (contiguous or non-contiguous) match of the spacer sequence in the RNA guide (e.g., crRNA) to the target substrate.

[0115] In some embodiments, the binary complex becomes activated upon binding to the target substrate. In some embodiments, the activated complex exhibits “multiple turnover” activity, whereby upon acting on (e.g., cleaving) the target substrate the activated complex remains in an activated state. In some embodiments, the activated binary complex exhibits “single turnover” activity, whereby upon acting on the target substrate the binary complex reverts to an inactive state. In some embodiments, the activated binary complex exhibits non-specific (i.e., “collateral”) cleavage activity whereby the complex cleaves non-target nucleic acids. In some embodiments, the non-target nucleic acid is a DNA (e.g., a single-stranded or a double-stranded DNA). In some embodiments, the non-target nucleic acid is an RNA (e.g., a single-stranded or a double-stranded RNA).

### CRISPR Enzyme Modifications

[0116] Deactivated/Inactivated CRISPR Enzymes

[0117] Where the CRISPR enzymes described herein have nuclease activity, the CRISPR enzymes can be modified to have diminished nuclease activity, e.g., nuclease inactivation of at least 50%, at least 60%, at least 70%, at least 80%, at least 90%, at least 95%, at least 97%, or 100% as compared with the wild type CRISPR enzymes. The nuclease activity can be diminished by several methods known in the art, e.g., introducing mutations into the nuclease domains of the proteins. In some embodiments, catalytic residues for the nuclease activities are identified, and these amino acid residues can be substituted by different amino acid residues (e.g., glycine or alanine) to diminish the nuclease activity.

[0118] The inactivated CRISPR enzymes can comprise or be associated with one or more functional domains (e.g., via fusion protein, linker peptides, “GS” linkers, etc.). These functional domains can have various activities, e.g., methylase activity, demethylase activity, transcription activation activity, transcription repression activity, transcription release factor activity, histone modification activity, RNA cleavage activity, DNA cleavage activity, nucleic acid binding activity, and switch activity (e.g., light inducible). In some embodiments, the functional domains are Krappel associated box (KRAB), VP64, VP16, Fok1, P65, HSF1, MyoD1, and biotin-APEX.

[0119] The positioning of the one or more functional domains on the inactivated CRISPR enzymes is one that allows for correct spatial orientation for the functional domain to affect the target with the attributed functional effect. For example, if the functional domain is a transcription activator (e.g., VP16, VP64, or p65), the transcription activator is placed in a spatial orientation that allows it to affect the transcription of the target. Likewise, a transcription repressor is positioned to affect the transcription of the target, and a nuclease (e.g., Fok1) is positioned to cleave or partially cleave the target. In some embodiments, the functional domain is positioned at the N-terminus of the CRISPR enzyme. In some embodiments, the functional domain is positioned at the C-terminus of the CRISPR enzyme. In some embodiments, the inactivated CRISPR enzyme is modified to comprise a first functional domain at the N-terminus and a second functional domain at the C-terminus.

[0120] Split Enzymes

[0121] The present disclosure also provides a split version of the CRISPR enzymes described herein. The split version of the CRISPR enzymes may be advantageous for delivery. In some embodiments, the CRISPR enzymes are split to two parts of the enzymes, which together substantially comprises a functioning CRISPR enzyme.

[0122] The split can be done in a way that the catalytic domain(s) are unaffected. The CRISPR enzymes may function as a nuclease or may be inactivated enzymes, which are essentially RNA-binding proteins with very little or no catalytic activity (e.g., due to mutation(s) in its catalytic domains).

[0123] In some embodiments, the nuclease lobe and α-helical lobe are expressed as separate polypeptides. Although the lobes do not interact on their own, the guide RNA recruits them into a ternary complex that recapitulates the activity of full-length CRISPR enzymes and catalyzes site-specific DNA cleavage. The use of a modified guide RNA abrogates split-enzyme activity by preventing dimerization, allowing for the development of an inducible dimerization system. The split enzyme is described, e.g., in Wright, Addison V., et al. “Rational design of a split-Cas9 enzyme complex,” Proc. Nat'l. Acad. Sci., 112.10 (2015): 2984-2989, which is incorporated herein by reference in its entirety.

[0124] In some embodiments, the split enzyme can be fused to a dimerization partner, e.g., by employing rapamycin sensitive dimerization domains. This allows the generation of a chemically inducible CRISPR enzyme for temporal control of CRISPR enzyme activity. The CRISPR enzymes can thus be rendered chemically inducible by being split into two fragments and rapamycin-sensitive dimerization domains can be used for controlled reassembly of the CRISPR enzymes.

[0125] The split point is typically designed in silico and cloned into the constructs. During this process, mutations can be introduced to the split enzyme and non-functional domains can be removed. In some embodiments, the two parts or fragments of the split CRISPR enzyme (i.e., the N-terminal and C-terminal fragments), can form a full CRISPR enzyme, comprising, e.g., at least 70%, at least 80%, at least 90%, at least 95%, or at least 99% of the sequence of the wild-type CRISPR enzyme.

[0126] Self-Activating or Inactivating Enzymes

[0127] The CRISPR enzymes described herein can be designed to be self-activating or self-inactivating. In some embodiments, the CRISPR enzymes are self-inactivating. For example, the target sequence can be introduced into the CRISPR enzyme coding constructs. Thus, the CRISPR enzymes can cleave the target sequence, as well as the construct encoding the enzyme thereby self-inactivating their expression. Methods of constructing a self-inactivating CRISPR system is described, e.g., in Epstein, Benjamin E., and David V. Schaffer. “Engineering a Self-Inactivating CRISPR System for AAV Vectors,” Mol. Ther., 24 (2016): S50, which is incorporated herein by reference in its entirety.

[0128] In some other embodiments, an additional guide RNA, expressed under the control of a weak promoter (e.g., 7SK promoter), can target the nucleic acid sequence encoding the CRISPR enzyme to prevent and/or block its expression (e.g., by preventing the transcription and/or translation of the nucleic acid). The transfection of cells with vectors expressing the CRISPR enzyme, guide RNAs, and guide RNAs that target the nucleic acid encoding the CRISPR enzyme can lead to efficient disruption of the nucleic acid encoding the CRISPR enzyme and decrease the levels of CRISPR enzyme, thereby limiting the genome editing activity.

[0129] In some embodiments, the genome editing activity of the CRISPR enzymes can be modulated through endogenous RNA signatures (e.g., miRNA) in mammalian cells. The CRISPR enzyme switch can be made by using a miRNA-complementary sequence in the 5′-UTR of mRNA encoding the CRISPR enzyme. The switches selectively and efficiently respond to miRNA in the target cells. Thus, the switches can differentially control the genome editing by sensing endogenous miRNA activities within a heterogeneous cell population. Therefore, the switch systems can provide a framework for cell-type selective genome editing and cell engineering based on intracellular miRNA information (Hirosawa, Moe et al. “Cell-type-specific genome editing with a microRNA-responsive CRISPR-Cas9 switch,” Nucl. Acids Res., 2017 July 27; 45(13): e118).

[0130] Inducible CRISPR Enzymes

[0131] The CRISPR enzymes can be inducible, e.g., light inducible or chemically inducible. This mechanism allows for activation of the functional domain in the CRISPR enzymes. Light inducibility can be achieved by various methods known in the art, e.g., by designing a fusion complex wherein CRY2 PHR/CIBN pairing is used in split CRISPR Enzymes (see, e.g., Konermann et al. “Optical control of mammalian endogenous transcription and epigenetic states,” Nature, 500.7463 (2013): 472). Chemical inducibility can be achieved, e.g., by designing a fusion complex wherein FKBP/FRB (FK506 binding protein/FKBP rapamycin binding domain) pairing is used in split CRISPR Enzymes. Rapamycin is required for forming the fusion complex, thereby activating the CRISPR enzymes (see, e.g., Zetsche, Volz, and Zhang, “A split-Cas9 architecture for inducible genome editing and transcription modulation,” Nature Biotech., 33.2 (2015): 139-142).

[0132] Furthermore, expression of the CRISPR enzymes can be modulated by inducible promoters, e.g., tetracycline or doxycycline controlled transcriptional activation (Tet-On and Tet-Off expression system), hormone inducible gene expression system (e.g., an ecdysone inducible gene expression system), and an arabinose-inducible gene expression system. When delivered as RNA, expression of the RNA targeting effector protein can be modulated via a riboswitch, which can sense a small molecule like tetracycline (see, e.g., Goldfless, Stephen J. et al. “Direct and specific chemical control of eukaryotic translation with a synthetic RNA-protein interaction,” Nucl. Acids Res., 40.9 (2012): e64-e64).

[0133] Various embodiments of inducible CRISPR enzymes and inducible CRISPR systems are described, e.g., in U.S. Pat. No. 8,871,445, US20160208243, and WO2016205764, each of which is incorporated herein by reference in its entirety.

[0134] Functional Mutations

[0135] Various mutations or modifications can be introduced into CRISPR enzymes as described herein to improve specificity and/or robustness. In some embodiments, the amino acid residues that recognize the Protospacer Adjacent Motif (PAM) are identified. The CRISPR enzymes described herein can be modified further to recognize different PAMs, e.g., by substituting the amino acid residues that recognize PAM with other amino acid residues. In some embodiments, the CRISPR enzymes can recognize, e.g., 5′-NGG-3′, 5′-YG-3′, 5′-TTTN-3′, or 5′-YTN-3′ PAM, wherein “Y” is a pyrimidine and “N” is any nucleobase.

[0136] In some embodiments, at least one Nuclear Localization Signal (NLS) is attached to the nucleic acid sequences encoding the CRISPR enzyme. In some embodiments, at least one Nuclear Export Signal (NES) is attached to the nucleic acid sequences encoding the CRISPR enzyme. In some embodiments, a C-terminal and/or N-terminal NLS or NES is attached for optimal expression and nuclear targeting in eukaryotic cells, e.g., human cells.

[0137] In some embodiments, the CRISPR enzymes described herein are mutated at one or more amino acid residues to alter one or more functional activities. For example, in some embodiments, the CRISPR enzyme is mutated at one or more amino acid residues to alter its helicase activity. In some embodiments, the CRISPR enzyme is mutated at one or more amino acid residues to alter its nuclease activity (e.g., endonuclease activity or exonuclease activity). In some embodiments, the CRISPR enzyme is mutated at one or more amino acid residues to alter its ability to functionally associate with a guide RNA. In some embodiments, the CRISPR enzyme is mutated at one or more amino acid residues to alter its ability to functionally associate with a target nucleic acid.

[0138] In some embodiments, the CRISPR enzymes described herein are capable of cleaving a target nucleic acid molecule. In some embodiments, the CRISPR enzyme cleaves both strands of the target nucleic acid molecule. However, in some embodiments, the CRISPR enzyme is mutated at one or more amino acid residues to alter its cleaving activity. For example, in some embodiments, the CRISPR enzyme may comprise one or more mutations that render the enzyme incapable of cleaving a target nucleic acid. In other embodiments, the CRISPR enzyme may comprise one or more mutations such that the enzyme is capable of cleaving a single strand of the target nucleic acid (i.e., nickase activity). In some embodiments, the CRISPR enzyme is capable of cleaving the strand of the target nucleic acid that is complementary to the strand that the guide RNA hybridizes to. In some embodiments, the CRISPR enzyme is capable of cleaving the strand of the target nucleic acid that the guide RNA hybridizes to.

[0139] In some embodiments, a CRISPR enzyme described herein may be engineered to comprise a deletion in one or more amino acid residues to reduce the size of the enzyme while retaining one or more desired functional activities (e.g., nuclease activity and the ability to interact functionally with a guide RNA). The truncated CRISPR enzyme may be used advantageously in combination with delivery systems having load limitations.

[0140] In one aspect, the present disclosure provides nucleic acid sequences that are at least 10%, 15%, 20%, 25%, 30%, 35%, 40%, 45%, 50%, 55%, 60%, 65%, 70%, 75%, 80%, 85%, 90%, 91%, 92%, 93%, 94%, 95%, 96%, 97%, 98%, or 99% identical to the nucleic sequences described herein. In another aspect, the present disclosure also provides amino acid sequences that are at least 10%, 15%, 20%, 25%, 30%, 35%, 40%, 45%, 50%, 55%, 60%, 65%, 70%, 75%, 80%, 85%, 90%, 91%, 92%, 93%, 94%, 95%, 96%, 97%, 98%, or 99% identical to the amino acid sequences described herein.

[0141] In some embodiments, the nucleic acid sequences have at least a portion (e.g., at least 1, 2, 3, 4, 5, 6, 7, 8, 9, 10, 11, 12, 13, 14, 15, 20, 30, 40, 50, 60, 70, 80, 90, or 100 nucleotides, e.g., contiguous or non-contiguous nucleotides) that are the same as the sequences described herein.

[0142] In some embodiments, the nucleic acid sequences have at least a portion (e.g., at least 1, 2, 3, 4, 5, 6, 7, 8, 9, 10, 11, 12, 13, 14, 15, 20, 30, 40, 50, 60, 70, 80, 90, or 100 nucleotides, e.g., contiguous or non-contiguous nucleotides) that is different from the sequences described herein.

[0143] In some embodiments, the amino acid sequences have at least a portion (e.g., at least 1, 2, 3, 4, 5, 6, 7, 8, 9, 10, 11, 12, 13, 14, 15, 20, 30, 40, 50, 60, 70, 80, 90, or 100 amino acid residues, e.g., contiguous or non-contiguous amino acid residues) that is the same as the sequences described herein. In some embodiments, the amino acid sequences have at least a portion (e.g., at least 1, 2, 3, 4, 5, 6, 7, 8, 9, 10, 11, 12, 13, 14, 15, 20, 30, 40, 50, 60, 70, 80, 90, or 100 amino acid residues, e.g., contiguous or non-contiguous amino acid residues) that is different from the sequences described herein.

[0144] To determine the percent identity of two amino acid sequences, or of two nucleic acid sequences, the sequences are aligned for optimal comparison purposes (e.g., gaps can be introduced in one or both of a first and a second amino acid or nucleic acid sequence for optimal alignment and non-homologous sequences can be disregarded for comparison purposes). In general, the length of a reference sequence aligned for comparison purposes should be at least 80% of the length of the reference sequence, and in some embodiments is at least 90%, 95%, or 100% of the length of the reference sequence. The amino acid residues or nucleotides at corresponding amino acid positions or nucleotide positions are then compared. When a position in the first sequence is occupied by the same amino acid residue or nucleotide as the corresponding position in the second sequence, then the molecules are identical at that position. The percent identity between the two sequences is a function of the number of identical positions shared by the sequences, taking into account the number of gaps, and the length of each gap, which need to be introduced for optimal alignment of the two sequences. For purposes of the present disclosure, the comparison of sequences and determination of percent identity between two sequences can be accomplished using a Blossum 62 scoring matrix with a gap penalty of 12, a gap extend penalty of 4, and a frameshift gap penalty of 5.

### Guide RNA Modifications

[0145] In some embodiments, an RNA guide described herein comprises a uracil (U). In some embodiments, an RNA guide described herein comprises a thymine (T). In some embodiments, a direct repeat sequence of an RNA guide described herein comprises a uracil (U). In some embodiments, a direct repeat sequence of an RNA guide described herein comprises a thymine (T). In some embodiments, a direct repeat sequence according to any of Tables 3, 9, or 13 comprises a sequence comprising a uracil, in one or more places indicated as thymine in the corresponding sequences in any of Tables 3, 9, or 13.

[0146] In some embodiments, the direct repeat comprises only one copy of a sequence that is repeated in an endogenous CRISPR array. In some embodiments, the direct repeat is a full-length sequence adjacent to (e.g., flanking) one or more spacer sequences found in an endogenous CRISPR array. In some embodiments, the direct repeat is a portion (e.g., processed portion) of a full-length sequence adjacent to (e.g., flanking) one or more spacer sequences found in an endogenous CRISPR array.

[0147] Spacer Lengths

[0148] In some embodiments, the CRISPR-Cas system is the CRISPR-Cas system of CLUST.121143. The spacer length of guide RNAs can range from about 15 to 50 nucleotides. In some embodiments, the spacer length of a guide RNA is at least 16 nucleotides, at least 17 nucleotides, at least 18 nucleotides, at least 19 nucleotides, at least 20 nucleotides, at least 21 nucleotides, at least 22 nucleotides, at least 23 nucleotides, at least 24 nucleotides, at least 25 nucleotides, at least 26 nucleotides, or at least 27 nucleotides. In some embodiments, the spacer length is from 15 to 17 nucleotides, from 15 to 23 nucleotides, from 16 to 22 nucleotides, from 17 to 20 nucleotides, from 20 to 24 nucleotides (e.g., 20, 21, 22, 23, or 24 nucleotides), from 23 to 25 nucleotides (e.g., 23, 24, or 25 nucleotides), from 24 to 27 nucleotides, from 27 to 30 nucleotides, from 30 to 33 nucleotides (e.g., 30, 31, 32, or 33 nucleotides), from 33 to 36 nucleotides (e.g., 33, 34, 35, or 36 nucleotides), from 36 to 40 nucleotides (e.g., 36, 37, 38, 39, or 40 nucleotides), from 40 to 45 nucleotides (e.g., 40, 41, 42, 43, 44, or 45 nucleotides), from 30 or 35 to 40 nucleotides, from 41 to 45 nucleotides, from 45 to 50 nucleotides, or longer. In some embodiments, the spacer length is between 22 to 40 nucleotides, or from 26 to 35 nucleotides. In some embodiments, the direct repeat length of the guide RNA is at least 16 nucleotides, or is from 16 to 20 nucleotides (e.g., 16, 17, 18, 19, or 20 nucleotides). In some embodiments, the direct repeat length of the guide RNA is 19 nucleotides.

[0149] In some embodiments, the CRISPR-Cas system is the CRISPR-Cas system of CLUST.196682. The spacer length of guide RNAs can range from about 15 to 50 nucleotides. In some embodiments, the spacer length of a guide RNA is at least 16 nucleotides, at least 17 nucleotides, at least 18 nucleotides, at least 19 nucleotides, at least 20 nucleotides, at least 21 nucleotides, or at least 22 nucleotides. In some embodiments, the spacer length is from 15 to 17 nucleotides, from 15 to 23 nucleotides, from 16 to 22 nucleotides, from 17 to 20 nucleotides, from 20 to 24 nucleotides (e.g., 20, 21, 22, 23, or 24 nucleotides), from 23 to 25 nucleotides (e.g., 23, 24, or 25 nucleotides), from 24 to 27 nucleotides, from 27 to 30 nucleotides, from 30 to 45 nucleotides (e.g., 30, 31, 32, 33, 34, 35, 40, or 45 nucleotides), from 30 or 35 to 40 nucleotides, from 41 to 45 nucleotides, from 45 to 50 nucleotides, or longer. In some embodiments, the direct repeat length of the guide RNA is at least 16 nucleotides, or is from 16 to 20 nucleotides (e.g., 16, 17, 18, 19, or 20 nucleotides). In some embodiments, the direct repeat length of the guide RNA is 19 nucleotides.

[0150] In some embodiments, the CRISPR-Cas system is the CRISPR-Cas system of CLUST.089537. The spacer length of guide RNAs can range from about 15 to 50 nucleotides. In some embodiments, the spacer length of a guide RNA is at least 16 nucleotides, at least 17 nucleotides, at least 18 nucleotides, at least 19 nucleotides, at least 20 nucleotides, at least 21 nucleotides, or at least 22 nucleotides. In some embodiments, the spacer length is from 15 to 17 nucleotides, from 15 to 23 nucleotides, from 16 to 22 nucleotides, from 17 to 20 nucleotides, from 20 to 24 nucleotides (e.g., 20, 21, 22, 23, or 24 nucleotides), from 23 to 25 nucleotides (e.g., 23, 24, or 25 nucleotides), from 24 to 27 nucleotides, from 27 to 30 nucleotides, from 30 to 45 nucleotides (e.g., 30, 31, 32, 33, 34, 35, 40, or 45 nucleotides), from 30 or 35 to 40 nucleotides, from 41 to 45 nucleotides, from 45 to 50 nucleotides, or longer. In some embodiments, the direct repeat length of the guide RNA is at least 16 nucleotides, or is from 16 to 20 nucleotides (e.g., 16, 17, 18, 19, or 20 nucleotides). In some embodiments, the direct repeat length of the guide RNA is 19 nucleotides.

[0151] In some embodiments, the direct repeat comprises only one copy of a sequence that is repeated in an endogenous CRISPR array. In some embodiments, the direct repeat is a full-length sequence adjacent to (e.g., flanking) one or more spacer sequences found in an endogenous CRISPR array. In some embodiments, the direct repeat is a portion (e.g., processed portion) of a full-length sequence adjacent to (e.g., flanking) one or more spacer sequences found in an endogenous CRISPR array.

[0152] The guide RNA sequences can be modified in a manner that allows for formation of the CRISPR complex and successful binding to the target, while at the same time not allowing for successful nuclease activity (i.e., without nuclease activity/without causing indels). These modified guide sequences are referred to as “dead guides” or “dead guide sequences.” These dead guides or dead guide sequences may be catalytically inactive or conformationally inactive with regard to nuclease activity. Dead guide sequences are typically shorter than respective guide sequences that result in active RNA cleavage. In some embodiments, dead guides are 5%, 10%, 20%, 30%, 40%, or 50%, shorter than respective guide RNAs that have nuclease activity. Dead guide sequences of guide RNAs can be from 13 to 15 nucleotides in length (e.g., 13, 14, or 15 nucleotides in length), from 15 to 19 nucleotides in length, or from 17 to 18 nucleotides in length (e.g., 17 nucleotides in length).

[0153] Thus, in one aspect, the disclosure provides non-naturally occurring or engineered CRISPR systems including a functional CRISPR enzyme as described herein, and a guide RNA (gRNA) wherein the gRNA comprises a dead guide sequence whereby the gRNA is capable of hybridizing to a target sequence such that the CRISPR system is directed to a genomic locus of interest in a cell without detectable cleavage activity.

[0154] A detailed description of dead guides is described, e.g., in WO 2016094872, which is incorporated herein by reference in its entirety.

[0155] Inducible Guides

[0156] Guide RNAs can be generated as components of inducible systems. The inducible nature of the systems allows for spatiotemporal control of gene editing or gene expression. In some embodiments, the stimuli for the inducible systems include, e.g., electromagnetic radiation, sound energy, chemical energy, and/or thermal energy.

[0157] In some embodiments, the transcription of guide RNA can be modulated by inducible promoters, e.g., tetracycline or doxycycline controlled transcriptional activation (Tet-On and Tet-Off expression systems), hormone inducible gene expression systems (e.g., ecdysone inducible gene expression systems), and arabinose-inducible gene expression systems. Other examples of inducible systems include, e.g., small molecule two-hybrid transcription activations systems (FKBP, ABA, etc.), light inducible systems (Phytochrome, LOV domains, or cryptochrome), or Light Inducible Transcriptional Effector (LITE). These inducible systems are described, e.g., in WO 2016205764 and U.S. Pat. No. 8,795,965, both of which are incorporated herein by reference in their entirety.

[0158] Chemical Modifications

[0159] Chemical modifications can be applied to the guide RNA's phosphate backbone, sugar, and/or base. Backbone modifications such as phosphorothioates modify the charge on the phosphate backbone and aid in the delivery and nuclease resistance of the oligonucleotide (see, e.g., Eckstein, “Phosphorothioates, essential components of therapeutic oligonucleotides,” Nucl. Acid Ther., 24 (2014), pp. 374-387); modifications of sugars, such as 2′-O-methyl (2′-OMe), 2′-F, and locked nucleic acid (LNA), enhance both base pairing and nuclease resistance (see, e.g., Allerson et al. “Fully 2′-modified oligonucleotide duplexes with improved in vitro potency and stability compared to unmodified small interfering RNA,” J. Med. Chem., 48.4 (2005): 901-904). Chemically modified bases such as 2-thiouridine or N6-methyladenosine, among others, can allow for either stronger or weaker base pairing (see, e.g., Bramsen et al., “Development of therapeutic-grade small interfering RNAs by chemical engineering,” Front. Genet., 2012 Aug. 20; 3:154). Additionally, RNA is amenable to both 5′ and 3′ end conjugations with a variety of functional moieties including fluorescent dyes, polyethylene glycol, or proteins.

[0160] A wide variety of modifications can be applied to chemically synthesized guide RNA molecules. For example, modifying an oligonucleotide with a 2′-OMe to improve nuclease resistance can change the binding energy of Watson-Crick base pairing. Furthermore, a 2′-OMe modification can affect how the oligonucleotide interacts with transfection reagents, proteins or any other molecules in the cell. The effects of these modifications can be determined by empirical testing.

[0161] In some embodiments, the guide RNA includes one or more phosphorothioate modifications. In some embodiments, the guide RNA includes one or more locked nucleic acids for the purpose of enhancing base pairing and/or increasing nuclease resistance.

[0162] A summary of these chemical modifications can be found, e.g., in Kelley et al., “Versatility of chemically synthesized guide RNAs for CRISPR-Cas9 genome editing,” J. Biotechnol. 2016 Sep. 10; 233:74-83; WO 2016205764; and U.S. Pat. No. 8,795,965 B2; each which is incorporated by reference in its entirety.

[0163] Sequence Modifications

[0164] The sequences and the lengths of the guide RNAs, tracrRNAs, and crRNAs described herein can be optimized. In some embodiments, the optimized length of guide RNA can be determined by identifying the processed form of tracrRNA and/or crRNA, or by empirical length studies for guide RNAs, tracrRNAs, crRNAs, and the tracrRNA tetraloops.

[0165] The guide RNAs can also include one or more aptamer sequences. Aptamers are oligonucleotide or peptide molecules that can bind to a specific target molecule. The aptamers can be specific to gene effectors, gene activators, or gene repressors. In some embodiments, the aptamers can be specific to a protein, which in turn is specific to and recruits/binds to specific gene effectors, gene activators, or gene repressors. The effectors, activators, or repressors can be present in the form of fusion proteins. In some embodiments, the guide RNA has two or more aptamer sequences that are specific to the same adaptor proteins. In some embodiments, the two or more aptamer sequences are specific to different adaptor proteins. The adaptor proteins can include, e.g., MS2, PP7, Qβ, F2, GA, fr, JP501, M12, R17, BZ13, JP34, JP500, KU1, M11, MX1, TW18, VK, SP, FI, ID2, NL95, TW19, AP205, ϕCb5, ϕCb8r, ϕCbl2r, ϕCb23r, 7s, and PRR1. Accordingly, in some embodiments, the aptamer is selected from binding proteins specifically binding any one of the adaptor proteins as described herein. In some embodiments, the aptamer sequence is a MS2 loop. A detailed description of aptamers can be found, e.g., in Nowak et al., “Guide RNA engineering for versatile Cas9 functionality,” Nucl. Acid. Res., 2016 Nov. 16; 44(20):9555-9564; and WO 2016205764, which are incorporated herein by reference in their entirety.

[0166] Guide: Target Sequence Matching Requirements

[0167] In classic CRISPR systems, the degree of complementarity between a guide sequence and its corresponding target sequence can be about 50%, 60%, 75%, 80%, 85%, 90%, 95%, 97.5%, 99%, or 100%. In some embodiments, the degree of complementarity is 100%. The guide RNAs can be about 5, 10, 11, 12, 13, 14, 15, 16, 17, 18, 19, 20, 21, 22, 23, 24, 25, 26, 27, 28, 29, 30, 35, 40, 45, 50, 75, or more nucleotides in length.

[0168] To reduce off-target interactions, e.g., to reduce the guide interacting with a target sequence having low complementarity, mutations can be introduced to the CRISPR systems so that the CRISPR systems can distinguish between target and off-target sequences that have greater than 80%, 85%, 90%, or 95% complementarity. In some embodiments, the degree of complementarity is from 80% to 95%, e.g., about 83%, 84%, 85%, 86%, 87%, 88%, 89%, 90%, 91%, 92%, 93%, 94%, or 95% (for example, distinguishing between a target having 18 nucleotides from an off-target of 18 nucleotides having 1, 2, or 3 mismatches). Accordingly, in some embodiments, the degree of complementarity between a guide sequence and its corresponding target sequence is greater than 94.5%, 95%, 95.5%, 96%, 96.5%, 97%, 97.5%, 98%, 98.5%, 99%, 99.5%, or 99.9%. In some embodiments, the degree of complementarity is 100%.

[0169] It is known in the field that complete complementarity is not required provided that there is sufficient complementarity to be functional. Modulations of cleavage efficiency can be exploited by introduction of mismatches, e.g., one or more mismatches, such as 1 or 2 mismatches between spacer sequence and target sequence, including the position of the mismatch along the spacer/target. Typically, the more central (i.e., not at the 3′ or 5′ ends) a mismatch, e.g., a double mismatch, is located; the more cleavage efficiency is affected. Accordingly, by choosing mismatch positions along the spacer sequence, cleavage efficiency can be modulated. For example, if less than 100% cleavage of targets is desired (e.g., in a cell population), 1 or 2 mismatches between spacer and target sequence can be introduced in the spacer sequences.

### Methods of Using CRISPR Systems

[0170] The CRISPR systems described herein have a wide variety of utilities including modifying (e.g., deleting, inserting, translocating, inactivating, or activating) a target polynucleotide in a multiplicity of cell types. The CRISPR systems have a broad spectrum of applications in, e.g., DNA/RNA detection (e.g., specific high sensitivity enzymatic reporter unlocking (SHERLOCK)), tracking and labeling of nucleic acids, enrichment assays (extracting desired sequence from background), detecting circulating tumor DNA, preparing next generation library, drug screening, disease diagnosis and prognosis, and treating various genetic disorders.

[0171] In another aspect, the disclosure provides methods of targeting the insertion or excision of a payload nucleic acid at a site of a target nucleic acid, wherein the methods include contacting the target nucleic acid with any of the systems described herein.

[0172] In another aspect, the disclosure provides methods of non-specifically degrading single-stranded DNA upon recognition of a DNA target nucleic acid, the method including contacting the target nucleic acid with any of the systems described herein.

[0173] In another aspect, the disclosure provides methods of detecting a target nucleic acid (e.g., DNA or RNA) in a sample, the methods including contacting the sample with any of the systems described herein and a labeled reporter nucleic acid, where hybridization of the crRNA to the target nucleic acid causes cleavage of the labeled reporter nucleic acid, and measuring a detectable signal produced by cleavage of the labeled reporter nucleic acid, thereby detecting the presence of the target nucleic acid in the sample.

[0174] In yet another aspect, the disclosure provides methods of treating a condition or disease in a subject in need thereof, the methods including administering to the subject any of the systems described herein, where the spacer sequence is complementary to between 22 to 40 nucleotides of a target nucleic acid associated with the condition or disease; where the CRISPR-associated protein associates with the RNA guide to form a complex; where the complex binds to a target nucleic acid sequence that is complementary to the nucleotides of the spacer sequence; and where upon binding of the complex to the target nucleic acid sequence the CRISPR-associated protein cleaves the target nucleic acid, thereby treating the condition or disease in the subject.

[0175] In one aspect, the disclosure provides methods of treating a condition or disease in a subject in need thereof, the methods including administering to the subject any of the systems described herein, where the spacer sequence is complementary to between 17 to 44 nucleotides of a target nucleic acid associated with the condition or disease; where the CRISPR-associated protein associates with the RNA guide to form a complex; where the complex binds to a target nucleic acid sequence that is complementary to the nucleotides of the spacer sequence; and where, upon binding of the complex to the target nucleic acid sequence, the CRISPR-associated protein cleaves the target nucleic acid, thereby treating the condition or disease in the subject.

[0176] In one aspect, the disclosure provides methods of treating a condition or disease in a subject in need thereof, the methods including administering to the subject any of the systems described herein, where the spacer sequence is complementary to between 20 to 40 nucleotides of a target nucleic acid associated with the condition or disease; where the CRISPR-associated protein associates with the RNA guide to form a complex; where the complex binds to a target nucleic acid sequence that is complementary to the nucleotides of the spacer sequence; and where upon binding of the complex to the target nucleic acid sequence the CRISPR-associated protein cleaves the target nucleic acid, thereby treating the condition or disease in the subject.

[0177] In another aspect, the disclosure provides methods for using any of the systems disclosed herein as a medicament (e.g., for use in the treatment or prevention of a condition or disease).

[0178] In some embodiments, the condition or disease is an infectious disease or cancer (e.g., Wilms' tumor, Ewing sarcoma, a neuroendocrine tumor, a glioblastoma, a neuroblastoma, a melanoma, skin cancer, breast cancer, colon cancer, rectal cancer, prostate cancer, liver cancer, renal cancer, pancreatic cancer, lung cancer, biliary cancer, cervical cancer, endometrial cancer, esophageal cancer, gastric cancer, head and neck cancer, medullary thyroid carcinoma, ovarian cancer, glioma, lymphoma, leukemia, myeloma, acute lymphoblastic leukemia, acute myelogenous leukemia, chronic lymphocytic leukemia, chronic myelogenous leukemia, Hodgkin's lymphoma, non-Hodgkin's lymphoma, or urinary bladder cancer).

[0179] In yet another aspect, the disclosure provides methods for using any of the systems disclosed herein in a method (e.g., an in vitro or ex vivo method) of editing a target nucleic acid, e.g., targeting and editing a target nucleic acid; non-specifically degrading single-stranded DNA upon recognition of a DNA target nucleic acid; targeting and nicking a non-spacer complementary strand of a double-stranded target DNA upon recognition of a spacer complementary strand of the double-stranded target DNA; targeting and cleaving a double-stranded target DNA; detecting a target nucleic acid in a sample; specifically editing a double-stranded nucleic acid; base editing a double-stranded nucleic acid; inducing genotype-specific or transcriptional-state-specific cell death or dormancy in a cell; creating an indel in a double-stranded target DNA; inserting a sequence into a double-stranded target DNA, or deleting or inverting a sequence in a double-stranded target DNA.

[0180] DNA/RNA Detection

[0181] In one aspect, the CRISPR systems described herein can be used in DNA/RNA detection. Single effector RNA-guided DNases can be reprogrammed with CRISPR RNAs (crRNAs) to provide a platform for specific single-stranded DNA (ssDNA) sensing. Upon recognition of its DNA target, activated Type V single effector DNA-guided DNases engage in “collateral” cleavage of nearby non-targeted ssDNAs. This crRNA-programmed collateral cleavage activity allows the CRISPR systems to detect the presence of a specific DNA by nonspecific degradation of labeled ssDNA.

[0182] The collateral ssDNA activity can be combined with a reporter in DNA detection applications such as a method called the DNA Endonuclease-Targeted CRISPR trans reporter (DETECTR) method, which achieves attomolar sensitivity for DNA detection (see, e.g., Chen et al., Science, 360(6387):436-439, 2018), which is incorporated herein by reference in its entirety. One application of using the enzymes described herein is to degrade non-specific ssDNA in an in vitro environment. A “reporter” ssDNA molecule linking a fluorophore and a quencher can also be added to the in vitro system, along with an unknown sample of DNA (either single-stranded or double-stranded). Upon recognizing the target sequence in the unknown piece of DNA, the effector complex cleaves the reporter ssDNA resulting in a fluorescent readout.

[0183] In other embodiments, the SHERLOCK method (Specific High Sensitivity Enzymatic Reporter UnLOCKing) also provides an in vitro nucleic acid detection platform with attomolar (or single-molecule) sensitivity based on nucleic acid amplification and collateral cleavage of a reporter ssDNA, allowing for real-time detection of the target. Methods of using CRISPR in SHERLOCK are described in detail, e.g., in Gootenberg, et al. “Nucleic acid detection with CRISPR-Cas13a/C2c2,” Science, 356(6336):438-442 (2017), which is incorporated herein by reference in its entirety.

[0184] In some embodiments, the CRISPR systems described herein can be used in multiplexed error-robust fluorescence in situ hybridization (MERFISH). These methods are described in, e.g., Chen et al., “Spatially resolved, highly multiplexed RNA profiling in single cells,” Science, 2015 Apr. 24; 348(6233):aaa6090, which is incorporated herein by reference in its entirety.

[0185] Tracking and Labeling of Nucleic Acids

[0186] Cellular processes depend on a network of molecular interactions among proteins, RNAs, and DNAs. Accurate detection of protein-DNA and protein-RNA interactions is key to understanding such processes. In vitro proximity labeling techniques employ an affinity tag combined with, a reporter group, e.g., a photoactivatable group, to label polypeptides and RNAs in the vicinity of a protein or RNA of interest in vitro. After UV irradiation, the photoactivatable groups react with proteins and other molecules that are in close proximity to the tagged molecules, thereby labelling them. Labelled interacting molecules can subsequently be recovered and identified. The RNA targeting effector proteins can for instance be used to target probes to selected RNA sequences. These applications can also be applied in animal models for in vivo imaging of diseases or difficult-to culture cell types. The methods of tracking and labeling of nucleic acids are described, e.g., in U.S. Pat. No. 8,795,965; WO 2016205764; and WO 2017070605; each of which is incorporated herein by reference in its entirety.

[0187] High-Throughput Screening

[0188] The CRISPR systems described herein can be used for preparing next generation sequencing (NGS) libraries. For example, to create a cost-effective NGS library, the CRISPR systems can be used to disrupt the coding sequence of a target gene, and the CRISPR enzyme transfected clones can be screened simultaneously by next-generation sequencing (e.g., on the Ion Torrent PGM system). A detailed description regarding how to prepare NGS libraries can be found, e.g., in Bell et al., “A high-throughput screening strategy for detecting CRISPR-Cas9 induced mutations using next-generation sequencing,” BMC Genomics, 15.1 (2014): 1002, which is incorporated herein by reference in its entirety.

[0189] Engineered Microorganisms

[0190] Microorganisms (e.g., E. coli, yeast, and microalgae) are widely used for synthetic biology. The development of synthetic biology has a wide utility, including various clinical applications. For example, the programmable CRISPR systems can be used to split proteins of toxic domains for targeted cell death, e.g., using cancer-linked RNA as target transcript. Further, pathways involving protein-protein interactions can be influenced in synthetic biological systems with, e.g., fusion complexes with the appropriate effectors such as kinases or enzymes.

[0191] In some embodiments, guide RNA sequences that target phage sequences can be introduced into the microorganism. Thus, the disclosure also provides methods of vaccinating a microorganism (e.g., a production strain) against phage infection.

[0192] In some embodiments, the CRISPR systems provided herein can be used to engineer microorganisms, e.g., to improve yield or improve fermentation efficiency. For example, the CRISPR systems described herein can be used to engineer microorganisms, such as yeast, to generate biofuel or biopolymers from fermentable sugars, or to degrade plant-derived lignocellulose derived from agricultural waste as a source of fermentable sugars. More particularly, the methods described herein can be used to modify the expression of endogenous genes required for biofuel production and/or to modify endogenous genes, which may interfere with the biofuel synthesis. These methods of engineering microorganisms are described e.g., in Verwaal et al., “CRISPR/Cpf1 enables fast and simple genome editing of Saccharomyces cerevisiae,” Yeast, 2017 Sep. 8. doi: 10.1002/yea.3278; and Hlavova et al., “Improving microalgae for biotechnology—from genetics to synthetic biology,” Biotechnol. Adv., 2015 Nov. 1; 33:1194-203, both of which are incorporated herein by reference in their entirety.

[0193] Application in Plants

[0194] The CRISPR systems described herein have a wide variety of utility in plants. In some embodiments, the CRISPR systems can be used to engineer genomes of plants (e.g., improving production, making products with desired post-translational modifications, or introducing genes for producing industrial products). In some embodiments, the CRISPR systems can be used to introduce a desired trait to a plant (e.g., with or without heritable modifications to the genome), or regulate expression of endogenous genes in plant cells or whole plants.

[0195] In some embodiments, the CRISPR systems can be used to identify, edit, and/or silence genes encoding specific proteins, e.g., allergenic proteins (e.g., allergenic proteins in peanuts, soybeans, lentils, peas, green beans, and mung beans). A detailed description regarding how to identify, edit, and/or silence genes encoding proteins is described, e.g., in Nicolaou et al., “Molecular diagnosis of peanut and legume allergy,” Curr. Opin. Allergy Clin. Immunol., 11(3):222-8 (2011), and WO 2016205764 A1; both of which are incorporated herein by reference in their entirety.

[0196] Gene Drives

[0197] Gene drive is the phenomenon in which the inheritance of a particular gene or set of genes is favorably biased. The CRISPR systems described herein can be used to build gene drives. For example, the CRISPR systems can be designed to target and disrupt a particular allele of a gene, causing the cell to copy the second allele to fix the sequence. Because of the copying, the first allele will be converted to the second allele, increasing the chance of the second allele being transmitted to the offspring. A detailed method regarding how to use the CRISPR systems described herein to build gene drives is described, e.g., in Hammond et al., “A CRISPR-Cas9 gene drive system targeting female reproduction in the malaria mosquito vector Anopheles gambiae,” Nat. Biotechnol., 2016 January; 34(1):78-83, which is incorporated herein by reference in its entirety.

[0198] Pooled-Screening

[0199] As described herein, pooled CRISPR screening is a powerful tool for identifying genes involved in biological mechanisms such as cell proliferation, drug resistance, and viral infection. Cells are transduced in bulk with a library of guide RNA (gRNA)-encoding vectors described herein, and the distribution of gRNAs is measured before and after applying a selective challenge. Pooled CRISPR screens work well for mechanisms that affect cell survival and proliferation, and they can be extended to measure the activity of individual genes (e.g., by using engineered reporter cell lines). Arrayed CRISPR screens, in which only one gene is targeted at a time, make it possible to use RNA-seq as the readout. In some embodiments, the CRISPR systems as described herein can be used in single-cell CRISPR screens. A detailed description regarding pooled CRISPR screenings can be found, e.g., in Datlinger et al., “Pooled CRISPR screening with single-cell transcriptome read-out,” Nat. Methods., 2017 March; 14(3):297-301, which is incorporated herein by reference in its entirety.

[0200] Saturation Mutagenesis (“Bashing”)

[0201] The CRISPR systems described herein can be used for in situ saturating mutagenesis. In some embodiments, a pooled guide RNA library can be used to perform in situ saturating mutagenesis for particular genes or regulatory elements. Such methods can reveal critical minimal features and discrete vulnerabilities of these genes or regulatory elements (e.g., enhancers). These methods are described, e.g., in Canver et al., “BCL11A enhancer dissection by Cas9-mediated in situ saturating mutagenesis,” Nature, 2015 Nov. 12; 527(7577):192-7, which is incorporated herein by reference in its entirety.

[0202] Therapeutic Applications

[0203] The CRISPR systems described herein can have various therapeutic applications. In some embodiments, the new CRISPR systems can be used to treat various diseases and disorders, e.g., genetic disorders (e.g., monogenetic diseases), diseases that can be treated by nuclease activity (e.g., Pcsk9 targeting, Duchenne Muscular Dystrophy (DMD), BCL11a targeting).

[0204] In some embodiments, the methods described here are used to treat a subject, e.g., a mammal, such as a human patient. The mammalian subject can also be a domesticated mammal, such as a dog, cat, horse, monkey, rabbit, rat, mouse, cow, goat, or sheep.

[0205] In some of the therapeutic methods described herein, the condition or disease is selected from the group consisting of Cystic Fibrosis, Duchenne Muscular Dystrophy, Becker Muscular Dystrophy, Alpha-1-antitrypsin Deficiency, Pompe Disease, Myotonic Dystrophy, Huntington Disease, Fragile X Syndrome, Friedreich's ataxia, Amyotrophic Lateral Sclerosis, Frontotemporal Dementia, Hereditary Chronic Kidney Disease, Hyperlipidemia, Hypercholesterolemia, Leber Congenital Amaurosis, Sickle Cell Disease, and Beta Thalassemia. In some embodiments of the methods described herein (and compositions for use in such methods), the condition or disease is a cancer or an infectious disease.

[0206] In some embodiments, the condition or disease is cancer, and wherein the cancer is selected from the group consisting of Wilms' tumor, Ewing sarcoma, a neuroendocrine tumor, a glioblastoma, a neuroblastoma, a melanoma, skin cancer, breast cancer, colon cancer, rectal cancer, prostate cancer, liver cancer, renal cancer, pancreatic cancer, lung cancer, biliary cancer, cervical cancer, endometrial cancer, esophageal cancer, gastric cancer, head and neck cancer, medullary thyroid carcinoma, ovarian cancer, glioma, lymphoma, leukemia, myeloma, acute lymphoblastic leukemia, acute myelogenous leukemia, chronic lymphocytic leukemia, chronic myelogenous leukemia, Hodgkin's lymphoma, non-Hodgkin's lymphoma, and urinary bladder cancer.

[0207] In another aspect, the disclosure provides the use of a system described herein in a method selected from the group consisting of RNA sequence specific interference; RNA sequence-specific gene regulation; screening of RNA, RNA products, lncRNA, non-coding RNA, nuclear RNA, or mRNA; mutagenesis; inhibition of RNA splicing; fluorescence in situ hybridization; breeding; induction of cell dormancy; induction of cell cycle arrest; reduction of cell growth and/or cell proliferation; induction of cell anergy; induction of cell apoptosis; induction of cell necrosis; induction of cell death; or induction of programmed cell death.

[0208] The methods can include the condition or disease being infectious, and wherein the infectious agent is selected from the group consisting of human immunodeficiency virus (HIV), herpes simplex virus-1 (HSV1), and herpes simplex virus-2 (HSV2).

[0209] In some embodiments, the CRISPR systems described herein can be used to edit a target nucleic acid to modify the target nucleic acid (e.g., by inserting, deleting, or mutating one or more amino acid residues). For example, in some embodiments the CRISPR systems described herein comprise an exogenous donor template nucleic acid (e.g., a DNA molecule or an RNA molecule), which comprises a desirable nucleic acid sequence. Upon resolution of a cleavage event induced with the CRISPR system described herein, the molecular machinery of the cell will utilize the exogenous donor template nucleic acid in repairing and/or resolving the cleavage event. Alternatively, the molecular machinery of the cell can utilize an endogenous template in repairing and/or resolving the cleavage event. In some embodiments, the CRISPR systems described herein may be used to alter a target nucleic acid resulting in an insertion, a deletion, and/or a point mutation). In some embodiments, the insertion is a scarless insertion (i.e., the insertion of an intended nucleic acid sequence into a target nucleic acid resulting in no additional unintended nucleic acid sequence upon resolution of the cleavage event). Donor template nucleic acids may be double stranded or single stranded nucleic acid molecules (e.g., DNA or RNA). Methods of designing exogenous donor template nucleic acids are described, for example, in PCT Publication No. WO 2016094874 A1, the entire contents of which are expressly incorporated herein by reference.

[0210] In one aspect, the CRISPR systems described herein can be used for treating a disease caused by overexpression of RNAs, toxic RNAs and/or mutated RNAs (e.g., splicing defects or truncations). For example, expression of the toxic RNAs may be associated with the formation of nuclear inclusions and late-onset degenerative changes in brain, heart, or skeletal muscle. In some embodiments, the disorder is myotonic dystrophy. In myotonic dystrophy, the main pathogenic effect of the toxic RNAs is to sequester binding proteins and compromise the regulation of alternative splicing (see, e.g., Osborne et al., “RNA-dominant diseases,” Hum. Mol. Genet., 2009 Apr. 15; 18(8):1471-81). Myotonic dystrophy (dystrophia myotonica (DM)) is of particular interest to geneticists because it produces an extremely wide range of clinical features. The classical form of DM, which is now called DM type 1 (DM1), is caused by an expansion of CTG repeats in the 3′-untranslated region (UTR) of DMPK, a gene encoding a cytosolic protein kinase. The CRISPR systems as described herein can target overexpressed RNA or toxic RNA, e.g., the DMPK gene or any of the mis-regulated alternative splicing in DM1 skeletal muscle, heart, or brain.

[0211] The CRISPR systems described herein can also target trans-acting mutations affecting RNA-dependent functions that cause various diseases such as, e.g., Prader Willi syndrome, Spinal muscular atrophy (SMA), and Dyskeratosis congenita. A list of diseases that can be treated using the CRISPR systems described herein is summarized in Cooper et al., “RNA and disease,” Cell, 136.4 (2009): 777-793, and WO 2016205764 A1, both of which are incorporated herein by reference in their entirety. Those of skill in this field will understand how to use the new CRISPR systems to treat these diseases.

[0212] The CRISPR systems described herein can also be used in the treatment of various tauopathies, including, e.g., primary and secondary tauopathies, such as primary age-related tauopathy (PART)/Neurofibrillary tangle (NFT)-predominant senile dementia (with NFTs similar to those seen in Alzheimer Disease (AD), but without plaques), dementia pugilistica (chronic traumatic encephalopathy), and progressive supranuclear palsy. A useful list of tauopathies and methods of treating these diseases are described, e.g., in WO 2016205764, which is incorporated herein by reference in its entirety.

[0213] The CRISPR systems described herein can also be used to target mutations disrupting the cis-acting splicing codes that can cause splicing defects and diseases. These diseases include, e.g., motor neuron degenerative disease that results from deletion of the SMN1 gene (e.g., spinal muscular atrophy), Duchenne Muscular Dystrophy (DMD), frontotemporal dementia, and Parkinsonism linked to chromosome 17 (FTDP-17), and cystic fibrosis.

[0214] The CRISPR systems described herein can further be used for antiviral activity, in particular against RNA viruses. The effector proteins can target the viral RNAs using suitable guide RNAs selected to target viral RNA sequences.

[0215] Furthermore, in vitro RNA sensing assays can be used to detect specific RNA substrates. The RNA targeting effector proteins can be used for RNA-based sensing in living cells. Examples of applications are diagnostics by sensing of, for examples, disease-specific RNAs.

[0216] A detailed description of therapeutic applications of the CRISPR systems described herein can be found, e.g., in U.S. Pat. No. 8,795,965, EP 3009511, WO 2016205764, and WO 2017070605; each of which is incorporated herein by reference in its entirety.

[0217] Delivery of CRISPR Systems

[0218] Through this disclosure and the knowledge in the art, the CRISPR systems described herein, or components thereof, nucleic acid molecules thereof, or nucleic acid molecules encoding or providing components thereof, can be delivered by various delivery systems such as vectors, e.g., plasmids, viral delivery vectors. The new CRISPR enzymes and/or any of the RNAs (e.g., guide RNAs) can be delivered using suitable vectors, e.g., plasmids or viral vectors, such as adeno-associated viruses (AAV), lentiviruses, adenoviruses, and other viral vectors, or combinations thereof. The proteins and one or more guide RNAs can be packaged into one or more vectors, e.g., plasmids or viral vectors.

[0219] In some embodiments, the vectors, e.g., plasmids or viral vectors, are delivered to the tissue of interest by, e.g., intramuscular injection, intravenous administration, transdermal administration, intranasal administration, oral administration, or mucosal administration. Such delivery may be either via a single dose or multiple doses. One skilled in the art understands that the actual dosage to be delivered herein may vary greatly depending upon a variety of factors, such as the vector choices, the target cells, organisms, tissues, the general conditions of the subject to be treated, the degrees of transformation/modification sought, the administration routes, the administration modes, the types of transformation/modification sought, etc.

[0220] In certain embodiments, the delivery is via adenoviruses, which can be at a single dose containing at least 1×10⁵ particles (also referred to as particle units, pu) of adenoviruses. In some embodiments, the dose preferably is at least about 1×10⁶ particles, at least about 1×10⁷ particles, at least about 1×10⁸ particles, and at least about 1×10⁹ particles of the adenoviruses. The delivery methods and the doses are described, e.g., in WO 2016205764 A1 and U.S. Pat. No. 8,454,972 B2, both of which are incorporated herein by reference in their entirety.

[0221] In some embodiments, the delivery is via plasmids. The dosage can be a sufficient number of plasmids to elicit a response. In some cases, suitable quantities of plasmid DNA in plasmid compositions can be from about 0.1 to about 2 mg. Plasmids will generally include (i) a promoter; (ii) a sequence encoding a nucleic acid-targeting CRISPR enzymes, operably linked to the promoter; (iii) a selectable marker; (iv) an origin of replication; and (v) a transcription terminator downstream of and operably linked to (ii). The plasmids can also encode the RNA components of a CRISPR complex, but one or more of these may instead be encoded on different vectors. The frequency of administration is within the ambit of the medical or veterinary practitioner (e.g., physician, veterinarian), or a person skilled in the art.

[0222] In another embodiment, the delivery is via liposomes or lipofectin formulations and the like, and can be prepared by methods known to those skilled in the art. Such methods are described, for example, in WO 2016205764 and U.S. Pat. Nos. 5,593,972; 5,589,466; and 5,580,859; each of which is incorporated herein by reference in its entirety.

[0223] In some embodiments, the delivery is via nanoparticles or exosomes. For example, exosomes have been shown to be particularly useful in delivery RNA.

[0224] Further means of introducing one or more components of the new CRISPR systems to the cell is by using cell-penetrating peptides (CPP). In some embodiments, a cell penetrating peptide is linked to the CRISPR enzymes. In some embodiments, the CRISPR enzymes and/or guide RNAs are coupled to one or more CPPs to transport them inside cells effectively (e.g., plant protoplasts). In some embodiments, the CRISPR enzymes and/or guide RNA(s) are encoded by one or more circular or non-circular DNA molecules that are coupled to one or more CPPs for cell delivery.

[0225] CPPs are short peptides of fewer than 35 amino acids derived either from proteins or from chimeric sequences capable of transporting biomolecules across cell membrane in a receptor independent manner. CPPs can be cationic peptides, peptides having hydrophobic sequences, amphipathic peptides, peptides having proline-rich and anti-microbial sequences, and chimeric or bipartite peptides. Examples of CPPs include, e.g., Tat (which is a nuclear transcriptional activator protein required for viral replication by HIV type 1), penetratin, Kaposi fibroblast growth factor (FGF) signal peptide sequence, integrin β3 signal peptide sequence, polyarginine peptide Args sequence, Guanine rich-molecular transporters, and sweet arrow peptide. CPPs and methods of using them are described, e.g., in Hillbrink et al., “Prediction of cell-penetrating peptides,” Methods Mol. Biol., 2015; 1324:39-58; Ramakrishna et al., “Gene disruption by cell-penetrating peptide-mediated delivery of Cas9 protein and guide RNA,” Genome Res., 2014 June; 24(6):1020-7; and WO 2016205764 A1; each of which is incorporated herein by reference in its entirety.

[0226] Various delivery methods for the CRISPR systems described herein are also described, e.g., in U.S. Pat. No. 8,795,965, EP 3009511, WO 2016205764, and WO 2017070605; each of which is incorporated herein by reference in its entirety.

### EXAMPLES

[0227] The invention is further described in the following examples, which do not limit the scope of the invention described in the claims.

### Example 1—Identification of Minimal Components for CLUST.121143 CRISPR-Cas System (FIGS. 1-4)

[0228] This protein family describes a large single effector associated with CRISPR systems found in uncultured metagenomic sequences collected from freshwater environments (FIG. 3). CLUST.121143 effectors include the examples of proteins detailed in TABLES 1 and 2, below. Examples of direct repeat sequences for these systems are shown in TABLE 3.

[0229] Examples of naturally occurring loci containing this effector complex are depicted in FIG. 1, indicating that for CLUST.121143 loci, the effector protein co-occurs with a CRISPR array. No other families of large proteins were identified within a bi-directional 15 kb window that co-occur with the effector protein or a CRISPR array.

[0230] The direct repeat sequence for CLUST.121143 exhibits a conserved motif of 5′-TGCAAAAG-3′ or 5′-TTTCAAAG-4′ proximal to the 3′ end (FIG. 2).

[0231] FIG. 3 is a schematic representation of a phylogenetic tree of CLUST.121143 effectors, showing that the family exhibits sequence diversity.

[0232] FIG. 4 is a schematic representation of a multiple sequence alignment of CLUST.121143 effector proteins revealing the location of the conserved catalytic residues of the RuvC domain, indicated by the colors Magenta, Blue, and Red.
[0233] Optionally, the CLUST.121 143 CRISPR systems described herein include a transactivating RNA (tracrRNA) with a DR homology as detailed in TABLE 4 and a complete tracrRNA contained in the DR homology loci detailed in TABLE 5. Optionally, the system includes a tracrRNA that is a subset of a non-coding sequence listed in TABLE 6.
[0234] Optionally, the CLUST.121 143 CRISPR systems described herein include an RNA modulator encoded by a non-coding sequence (or fragment thereof) listed in TABLE 6.

TABLE 1
Representative CLUST.121143 Effector Proteins

| | | # | | | effector |
|---|---|---|---|---|---|
| species | effector accession | spacers | cas1 | cas2 | size |
| aquatic-freshwater | 3300013006\|Ga0164294_10029128_3\|M | 11 | N | N | 878 |
| (3300013006\|Ga0164294_10029128) | | | | | |
| aquatic-freshwater | 3300013087\|Ga0163212_1009539_3\|M | 6 | N | N | 877 |
| (3300013087\|Ga0163212_1009539) | | | | | |
| aquatic-freshwater | 3300013131\|Ga0172373_10014249_3\|P | 11 | N | N | 877 |
| (3300013131\|Ga0172373_10014249) | | | | | |
| aquatic-freshwater | 3300013131\|Ga0172373_10021309_4\|M | 4 | N | N | 867 |
| (3300013131\|Ga0172373_10021309) | | | | | |
| aquatic-freshwater | 3300013132\|Ga0172372_10046622_2\|M | 4 | N | N | 867 |
| (3300013132\|Ga0172372_10046622) | | | | | |
| aquatic-freshwater | 3300014720\|Ga0172376_10007396_6\|M | 11 | N | N | 877 |
| (3300014720\|Ga0172376_10007396) | | | | | |
| aquatic-freshwater | 3300014720\|Ga0172376_10013958_4\|M | 4 | N | N | 867 |
| (3300014720\|Ga0172376_10013958) | | | | | |
| aquatic-freshwater | 3300018790\|Ga0187842_1006374_2\|M | 11 | N | N | 878 |
| (3300018790\|Ga0187842_1006374) | | | | | |
| aquatic-freshwater | 3300018815\|Ga0187845_1009203_1\|M | 11 | N | N | 878 |
| (3300018815\|Ga0187845_1009203) | | | | | |
| aquatic-freshwater | 3300018868\|Ga0187844_10013314_2\|M | 11 | N | N | 878 |
| (3300018868\|Ga0187844_10013314) | | | | | |
| aquatic-freshwater | 3300019093\|Ga0187843_10013171_2\|M | 11 | N | N | 708 |
| (3300019093\|Ga0187843_10013171) | | | | | |
| aquatic-freshwater | 3300023179\|Ga0214923_10008431_2\|P | 2 | N | N | 885 |
| (3300023179\|Ga0214923_10008431) | | | | | |
| aquatic-freshwater | 3300027730\|Ga0247833_1032983_1\|M | 2 | N | N | 878 |
| (3300027730\|Ga0247833_1032983) | | | | | |
| aquatic-freshwater | 3300028114\|Ga0247835_1021903_1\|P | 4 | N | N | 878 |
| (3300028114\|Ga0247835_1021903) | | | | | |
| aquatic-freshwater | 3300028553\|Ga0247839_1034275_1\|M | 2 | N | N | 878 |
| (3300028553\|Ga0247839_1034275) | | | | | |
| aquatic-freshwater | 3300028569\|Ga0247843_1031164_2\|P | 5 | N | N | 878 |
| (3300028569\|Ga0247843_1031164) | | | | | |
| aquatic-freshwater-bog | 3300014164\|Ga0181532_10001487_14\|M | 3 | Y | Y | 951 |
| (3300014164\|Ga0181532_10001487) | | | | | |
| aquatic-freshwater-bog | 3300014164\|Ga0181532_10001487_14\|P | 3 | Y | Y | 1000 |
| (3300014164\|Ga0181532_10001487) | | | | | |
| aquatic-freshwater-bog | 3300014165\|Ga0181523_10000360_35\|M | 26 | Y | Y | 951 |
| (3300014165\|Ga0181523_10000360) | | | | | |
| aquatic-freshwater-bog | 3300014165\|Ga0181523_10000360_33\|P | 26 | Y | Y | 1000 |
| (3300014165\|Ga0181523_10000360) | | | | | |
| aquatic-freshwater-bog | 3300014200\|Ga0181526_10000193_31\|M | 26 | Y | Y | 951 |
| (3300014200\|Ga0181526_10000193) | | | | | |
| aquatic-freshwater-bog | 3300014200\|Ga0181526_10000193_30\|P | 26 | Y | Y | 1000 |
| (3300014200\|Ga0181526_10000193) | | | | | |
| aquatic-freshwater-freshwater and | 3300027720\|Ga0209617_10001817_3\|M | 7 | N | N | 878 |
| sediment | | | | | |
| (3300027720\|Ga0209617_10001817) | | | | | |
| aquatic-freshwater-peatland | 3300009764\|Ga0116134_1001531_13\|P | 34 | Y | Y | 941 |
| (3300009764\|Ga0116134_1001531) | | | | | |
| aquatic-freshwater-peatland | 3300018009\|Ga0187884_10009678_2\|M | 8 | Y | Y | 941 |
| (3300018009\|Ga0187884_10009678) | | | | | |
| aquatic-freshwater-peatland | 3300018014\|Ga0187860_1004616_12\|M | 34 | Y | Y | 941 |
| (3300018014\|Ga0187860_1004616) | | | | | |
| aquatic-freshwater-peatland | 3300018016\|Ga0187880_1008327_2\|M | 22 | Y | Y | 941 |
| (3300018016\|Ga0187880_1008327) | | | | | |
| aquatic-freshwater-peatland | 3300018017\|Ga0187872_10010132_5\|M | 6 | Y | Y | 941 |
| (3300018017\|Ga0187872_10010132) | | | | | |
| aquatic-freshwater-peatland | 3300018022\|Ga0187864_10004559_12\|P | 34 | Y | Y | 941 |
| (3300018022\|Ga0187864_10004559) | | | | | |
| aquatic-freshwater-peatland | 3300018040\|Ga0187862_10006434_12\|P | 34 | Y | Y | 941 |
| (3300018040\|Ga0187862_10006434) | | | | | |
| soil metagenome (OCZT010053476) | OCZT010053476_2\|M | 2 | N | N | 887 |
| terrestrial-soil-fen | 3300014839\|Ga0182027_10014967_5\|M | 49 | Y | Y | 888 |
| (3300014839\|Ga0182027_10014967) | | | | | |

TABLE 2
Amino acid sequences of Representative CLUST.121143 Effector Proteins

>3300013006|Ga0164294_10029128_3|M
[aquatic-freshwater]
MNHKSTVKASVRHLTRHALQKPGEESDPGETTKTLKFRVDAKGHTRTRLDQIFTAQRQFVRDLLNKLEGMWDKDPQRFIRMVES
SASDPFESKTSCYGWMMTKFLTGSDLPEHLSRSAATASVATLSGNMKSFVTRRENVLKDMAVVIERNMENCEAGLKDLCAELKI
DRFKSPPSVDLESINAKTVEKYNEWVAAARVWCNLILAQKHKIPRGDAFFPTRLKAYPGFPGSVIHKEATSFATAIKELRKCLA
DLKQSHQKLFGALSNEEWSLVLERFPAPEGTGGKGMRHQLGKTLAVLGKKHPEWKPRQYIEELVAGLERGADSMAKHLENRQFS
DRPAAIKLINLLNNACVVLMEPLRVKSLYKEYFEQDTPRRNAFGQARGSLAEPTDQADSLQILGFSLMDEVRGICRYDGFLAFA
GDKEKDQWAFFFDPDGPGGMGIADPVKHPKGSTDSGYIGFGTMGGSRKRAQAAEKRLVRERLWIRRDRKPLQLPLHFGTRQGRE
YLWNFDHGLKKSSDPWMLTNGRLLRIYPPNRPQFSDYFLTITLQKDTPPLAISSGEKLVGVDRGEQNPASFAVVDAKGRLLERG
NVGEKYTAKIRQFAEMKSDLQRTAGGYTRKLRAKERNTASALGGLVMRELLDLLVRHPGALVFERLSSGITTRGGRGTLMGNMH
YERILSGVEGKLAEAGCYKAPSAAKYRKGITPFLRFVNPAYTSATCSACGEVFSSSWYKKTAATISKESPGSWSVTLPNGKKLQ
LPCSYTSYMRGRGEKTWNTAERLEELFKDRTWSDLPPSTRKTVEGLVARLTHHRPKRGEFVCPSCGHKDDADLQAALNIARKSI
WVSSLPPRQAKQSEGEDRRSTEEPWRVWYKKQIMEKWS (SEQ ID NO: 1)
>3300013087|Ga0163212_1009539_3|M
[aquatic-freshwater]
MIHKSTVKASVRHLTRHALDKPGEGDPGETTKTLKFRIDAKGHTRTRLDQIFSAQRQFVRDLLNKLEGMWDKDPERFIRMARSS
PSEPFEKKTSCAGWMLTKFLTGSDLPKHLSRQSARATLSPLSRNMKSFITRRKNVLKDMAVVIGRNRDNWDSGLKELCAELKVD
QFKGPPSVDPDKLNAKTVEKYNEWVAAARVWCNLILAQKHKIPRGDAFFPTRLKAYPGFPGSVIHKEAVPFSTAIEELRKCLAD
LKRSQLKLFDGLTAEEWVLVLERFPATEGEGGKGMRHQLGKTLAVLGKKHSDWKPRQLVEELVAGLERGADSLVNHLKDRDFSD
RPAAIKLINLLNNACVVLMEPLRVKNLYREYFEQDTPRRNAFGQARGSLAEPTDQADSLEIEGFSLKKGDAGSCNFDGLLAVTP
KDGKDQWSFFFDPEGPGGMGIAEITKHPRGSTTTEHLSFGSSGGSRKKAQASEKKLVRERLWIRRDRKPLQLPLQFGTRQGREY
LWNFDHGLKKSSDPWLLANGRLLRVYPINRPQFSQYNLTITLQKDTPPLALSAGEMLIGVDRGEVNPASFAVVDAKGKLLKCGN
VGEKYTAKIRQLAEMKSDLQRTAGGYTRKLRAKERNTASALGGLVIRELLDLLVRHPGDLVFERLTSGITTRGGRGTLMGNMHY
ERIMSGVEGKLAEAGCYKVPRATKFRSKDTRFVRFVHPAYTSATCSACGDVFSSGWYKKTAATIAKESPGSWSVTLPSGKKIQL
PSSYTYYMRGRGEKTWNTAERLEELFKGRKWSDLPPSTRKTVEGLVARLIHHRPKRGEFVCPSCGHKDDADLQAALNIARKSIW
VRSLPPRQAKQSEGEDRRSTEEPWREWYKKQIREKWA (SEQ ID NO: 2)
>3300013131|Ga0172373_10014249_3|P
[aquatic-freshwater]
MIHKSTVKASVRHLTRHALDKPGEGDPGETTKTLKFRIDAKDHTRTRLDQIFNAQRQFVRDLLNKLEGMWDKDPERFIRMVRSS
ASEPFEKKTSCAGWMLTKFLTGSDLPEHLSRSSATASVATLSGNMKSFITRRENVLKDMAVVIERNRENWDSGLKELCAELKID
QFKAPPSVDPDKLNAKTVEKYNEWVAAARVWCNLILAQKHKIPRGDAFFPTRLKAYPGFPGSVIHKEGIAFDTAIKELRKCLAD
LKRSHLKLFDGLTVEEWGLVLERFPAPEGEGGKGMRHQLGKTLAVLGKKHSDWKPRQLAEELVTGLERGADSLANHLKDRDFSD
RPAAIKLINLLNNACVVLMEPLRVKNLYREYFEQDTPRRNAFGQARGSLAEPTDQADSLQIMGFAIRKTPEGHSGFDGFLAVSQ
KEGKDIWSFFFDPDGPGGMGLCDASKHPRGSTTTDQIGFGTSGGSRKRAQAAEKRLVRERLWIRRDRKPLQLPLQFGTRQGREY
LWNFDHGLKKSSDPWMLTNGRLLRIYPPNRPQFSQYYLTIALQKDTPPPALTAGEMLIGVDRGEQNPASYAVTDGKGKLLAKGN
VGESYSAKIRQFAEMKSEMQRTAGGYTRKLRAKERNTASALGGLVIRELLDLLVRHPGALVFERLTSGITTRGGRGTLMGNMHY
ERILSGVEGKLAEAGCYKAPSAAKYRKGITPFLRFVNPAYTSATCSACGDVFSSGWYRKAAATISRESSGSWSVTLPSGKKVQL
PSSYTSYMRGRGEKTWNTAERLEELFKGRKWSDLPPSTRKTVDGLVARLIHHRPKRGEFVCPSCARKDDADLQAALNIARKSIW
VSSLPHRQAKQSEGEDRRSTEEPWREWYKKRIREKWA (SEQ ID NO: 3)
>3300013131|Ga0172373_10021309_4|M
[aquatic-freshwater]
MIHKSTVKASVRHLTRHALDKPGEGDPGKPTTKTLKFRIDAKGHTRTRLDQIFTAQNHFRRDLYIKLEGMWDKDPESFISMVNS
SPSKPFQKKTSCSGWIETKFVTGVALPEHLSRETAAATAVAVGNSLTATFERRKNVISQLAKNIEENRSVWRGNLKELCSELKI
TPFKAPPSIHPAKINAKTVEKYNEWVAAARIWCNLILVQKHRVPRNSACLPVRLKHYPGFPGSVIFKKGASLATAIKEFRKCLA
GLKRSQLKLFDGLTAEEWGLVIDRFPAPEGEGGKGMRHQLGKTLAVLGKKHPDWKPRQLVEELVAGLERGADSLVNHLKDRDFS
DRPAAIKLINLLNNACVVLMEPLRVKNLYRELFEVGTPRRDAFGQARGALAEPTDQSEGLEIRGFSIRTNRPPIGHSSFNGFLA
VRQTEGKDEWSFFFDPDGPGGMGLSGLPPAGSIPTDYIGFGSTGGSRKKAQASEKKLVRERLWIRRDRNPLQLPLQFGKRQGRE
YLWNFDHGLKKSSDPWMLANGRLLRVYPPNQPQFSDYFLTITLQKDTPPLALSAGEMLIGVDQGEVNPASYAVTDAKGKLLTRG
NVGESYSAKIRQFAEMKSAEQRTAGGYTRKLRSKERNTASACGGLVIRELLDLLVRYPGALVFERLSSGIATRGGRGTLMSNMH
YQRITGGIEKKLSEAGCHRITDFKSNFSPFLRMVQPHYTSATCSNCGEVFDSDWYEKLTATIRKSVSGSWVVTLPDGKELWLQG
REEIPWNPTDRLEEIFKGRTFPDLTSRSQKIVQGIVGRLVAFRPKRGEFVCPCCGHTDDADLQAALNIARKSIWLSTLPKRSKK
ETLAEARGSTKPAWKKWYQNRISENWC (SEQ ID NO: 4)
>3300013132|Ga0172372_10046622_2|M
[aquatic-freshwater]
MIHKSTVKASVRHLTRHALDKPGEGDPGKPTTKTLKFRIDAKGHTRTRLDQIFTAQNHFRRDLYIKLEGMWDKDPESFISMVNS
SPSKPFQKKTSCSGWIETKFVTGVALPEHLSRETAAATAVAVGNSLTATFERRKNVISQLAKNIEENRSVWRGNLKELCSELKI
TPFKAPPSIHPAKINAKTVEKYNEWVAAARIWCNLILVQKHRVPRNSACLPVRLKHYPGFPGSVIFKKGASLATAIKEFRKCLA
GLKRSQLKLFDGLTAEEWGLVIDRFPAPEGEGGKGMRHQLGKTLAVLGKKHPDWKPRQLVEELVAGLERGADSLVNHLKDRDFS
DRPAAIKLINLLNNACVVLMEPLRVKNLYRELFEVGTPRRDAFGQARGALAEPTDQSEGLEIRGFSIRTNRPPIGHSSFNGFLA
VRQTEGKDEWSFFFDPDGPGGMGLSGLPPAGSIPTDYIGFGSTGGSRKKAQASEKKLVRERLWIRRDRNPLQLPLQFGKRQGRE
YLWNFDHGLKKSSDPWMLANGRLLRVYPPNQPQFSDYFLTITLQKDTPPLALSAGEMLIGVDQGEVNPASYAVTDAKGKLLTRG
NVGESYSAKIRQFAEMKSAEQRTAGGYTRKLRSKERNTASACGGLVIRELLDLLVRYPGALVFERLSSGIATRGGRGTLMSNMH
YQRITGGIEKKLSEAGCHRITDFKSNFSPFLRMVQPHYTSATCSNCGEVFDSDWYEKLTATIRKSVSGSWVVTLPDGKELWLQG
REEIPWNPTDRLEEIFKGRTFPDLTSRSQKIVQGIVGRLVAFRPKRGEFVCPCCGHTDDADLQAALNIARKSIWLSTLPKRSKK
ETLAEARGSTKPAWKKWYQNRISENWC (SEQ ID NO: 4)
>3300014720|Ga0172376_10007396_6|M
[aquatic-freshwater]
MIHKSTVKASVRHLTRHALDKPGEGDPGETTKTLKFRIDAKDHTRTRLDQIFNAQRQFVRDLLNKLEGMWDKDPERFIRMVRSS
ASEPFEKKTSCAGWMLTKFLTGSDLPEHLSRSSATASVATLSGNMKSFITRRENVLKDMAVVIERNRENWDSGLKELCAELKID
QFKAPPSVDPDKLNAKTVEKYNEWVAAARVWCNLILAQKHKIPRGDAFFPTRLKAYPGFPGSVIHKEGIAFDTAIKELRKCLAD
LKRSHLKLFDGLTVEEWGLVLERFPAPEGEGGKGMRHQLGKTLAVLGKKHSDWKPRQLAEELVTGLERGADSLANHLKDRDFSD
RPAAIKLINLLNNACVVLMEPLRVKNLYREYFEQDTPRRNAFGQARGSLAEPTDQADSLQIMGFAIRKTPEGHSGFDGFLAVSQ
KEGKDIWSFFFDPDGPGGMGLCDASKHPRGSTTTDQIGFGTSGGSRKRAQAAEKRLVRERLWIRRDRKPLQLPLQFGTRQGREY
LWNFDHGLKKSSDPWMLTNGRLLRIYPPNRPQFSQYYLTIALQKDTPPPALTAGEMLIGVDRGEQNPASYAVTDGKGKLLAKGN
VGESYSAKIRQFAEMKSEMQRTAGGYTRKLRAKERNTASALGGLVIRELLDLLVRHPGALVFERLTSGITTRGGRGTLMGNMHY
ERILSGVEGKLAEAGCYKAPSAAKYRKGITPFLRFVNPAYTSATCSACGDVFSSGWYRKAAATISRESSGSWSVTLPSGKKVQL
PSSYTSYMRGRGEKTWNTAERLEELFKGRKWSDLPPSTRKTVDGLVARLIHHRPKRGEFVCPSCARKDDADLQAALNIARKSIW
VSSLPHRQAKQSEGEDRRSTEEPWREWYKKRIREKWA (SEQ ID NO: 3)
>3300014720|Ga0172376_10013958_4|M
[aquatic-freshwater]
MIHKSTVKASVRHLTRHALDKPGEGDPGKPTTKTLKFRIDAKGHTRTRLDQIFTAQNHFRRDLYIKLEGMWDKDPESFISMVNS
SPSKPFQKKTSCSGWIETKFVTGVALPEHLSRETAAATAVAVGNSLTATFERRKNVISQLAKNIEENRSVWRGNLKELCSELKI
TPFKAPPSIHPAKINAKTVEKYNEWVAAARIWCNLILVQKHRVPRNSACLPVRLKHYPGFPGSVIFKKGASLATAIKEFRKCLA
GLKRSQLKLFDGLTAEEWGLVIDRFPAPEGEGGKGMRHQLGKTLAVLGKKHPDWKPRQLVEELVAGLERGADSLVNHLKDRDFS
DRPAAIKLINLLNNACVVLMEPLRVKNLYRELFEVGTPRRDAFGQARGALAEPTDQSEGLEIRGFSIRTNRPPIGHSSFNGFLA
VRQTEGKDEWSFFFDPDGPGGMGLSGLPPAGSIPTDYIGFGSTGGSRKKAQASEKKLVRERLWIRRDRNPLQLPLQFGKRQGRE
YLWNFDHGLKKSSDPWMLANGRLLRVYPPNQPQFSDYFLTITLQKDTPPLALSAGEMLIGVDQGEVNPASYAVTDAKGKLLTRG
NVGESYSAKIRQFAEMKSAEQRTAGGYTRKLRSKERNTASACGGLVIRELLDLLVRYPGALVFERLSSGIATRGGRGTLMSNMH
YQRITGGIEKKLSEAGCHRITDFKSNFSPFLRMVQPHYTSATCSNCGEVFDSDWYEKLTATIRKSVSGSWVVTLPDGKELWLQG
REEIPWNPTDRLEEIFKGRTFPDLTSRSQKIVQGIVGRLVAFRPKRGEFVCPCCGHTDDADLQAALNIARKSIWLSTLPKRSKK
ETLAEARGSTKPAWKKWYQNRISENWC (SEQ ID NO: 4)
>3300018790|Ga0187842_1006374_2|M
[aquatic-freshwater]
MNHKSTVKASVRHLTRHALQKPGEESDPGETTKTLKFRVDAKGHTRTRLDQIFTAQRQFVRDLLNKLEGMWDKDPQRFIRMVES
SASDPFESKTSCYGWMMTKFLTGSDLPEHLSRSAATASVATLSGNMKSFVTRRENVLKDMAVVIERNMENCEAGLKDLCAELKI
DRFKSPPSVDLESINAKTVEKYNEWVAAARVWCNLILAQKHKIPRGDAFFPTRLKAYPGFPGSVIHKEATSFATAIKELRKCLA
DLKQSHQKLFGALSNEEWSLGLERFPAPEGTGGKGMRHQLGKTLAVLGKKHPEWKPRQYIEELVAGLERGADSMAKHLENRQFS
DRPAAIKLINLLNNACVVLMEPLRVKSLYKEYFEQDTPRRNAFGQARGSLAEPTDQADSLQILGFSLMDEVRGICRYDGFLAFA
GDKEKDQWAFFFDPDGPGGMGIADPVKHPKGSTDSGYIGFGTMGGSRKRAQAAEKRLVRERLWIRRDRKPLQLPLHFGTRQGRE
YLWNFDHGLKKSSDPWMLTNGRLLRIYPPNRPQFSDYFLTITLQKDTPPLAISSGEKLVGVDRGEQNPASFAVVDAKGRLLERG
NVGEKYTAKIRQFAEMKSDLQRTAGGYTRKLRAKERNTASALGGLVMRELLDLLVRHPGALVFERLSSGITTRGGRGTLMGNMH
YERILSGVEGKLAEAGCYKAPSAAKYRKGITPFLRFVNPAYTSATCSACGEVFSSSWYKKTAATISKESPGSWSVTLPNGKKLQ
LPCSYTSYMRGRGEKTWNTAERLEELFKDRTWSDLPPSTRKTVEGLVARLTHHRPKRGEFVCPSCGHKDDADLQAALNIARKSI
WVSSLPPRQAKQSEGEDRRSTEEPWRVWYKKQIMEKWS (SEQ ID NO: 5)
>3300018815|Ga0187845_1009203_1|M
[aquatic-freshwater]
MNHKSTVKASVRHLTRHALQKPGEESDPGETTKTLKFRVDAKGHTRTRLDQIFTAQRQFVRDLLNKLEGMWDKDPQRFIRMVES
SASDPFESKTSCYGWMMTKFLTGSDLPEHLSRSAATASVATLSGNMKSFVTRRENVLKDMAVVIERNMENCEAGLKDLCAELKI
DRFKSPPSVDLESINAKTVEKYNEWVAAARVWCNLILAQKHKIPRGDAFFPTRLKAYPGFPGSVIHKEATSFATAIKELRKCLA
DLKQSHQKLFGALSNEEWGLVLERFPAPEGTGGKGMRHQLGKTLAVLGKKHPEWKPRQYIEELVAGLERGADSMAKHLENRQFS
DRPAAIKLINLLNNACVVLMEPLRVKSLYKEYFEQDTPRRNAFGQARGSLAEPTDQADSLQILGFSLMDEVRGICRYDGFLAFA
GDKEKDQWAFFFDPDGPGGMGIADPVKHPKGSTDSGYIGFGTMGGSRKRAQAAEKRLVRERLWIRRDRKPLQLPLHFGTRQGRE
YLWNFDHGLKKSSDPWMLTNGRLPRIYPPNRPQFSDYFLTITLQKDTPPLAISSGEKLVGVDRGEQNPASFAVVDAKGRLLERG
NVGEKYTAKIRQFAEMKSDLQRTAGGYTRKLRAKERNTASALGGLVMRELLDLLVRHPGALVFERLSSGITTRGGRGTLMGNMH
YERILSGVEGKLAEAGCYKAPSAAKYRKGITPFLRFVNPAYTSATCSACGEVFSSSWYKKTAATISKESPGSWSVTLPNGKKLQ
LPCSYTSYMRGRGEKTWNTAERLEELFKDRTWSDLPPSTRKTVEGLVARLTHHRPKRGEFVCPSCGHKDDADLQAALNIARKSI
WVSSLPPRQAKQSEGEDRRSTEEPWRVWYKKQIMEKWS (SEQ ID NO: 6)
>3300018868|Ga0187844_10013314_2|M
[aquatic-freshwater]
MNHKSTVKASVRHLTRHALQKPGEESDPGETTKTLKFRVDAKGHTRTRLDQIFTAQRQFVRDLLNKLEGMWDKDPQRFIRMVES
SASDPFESKTSCYGWMMTKFLTGSDLPEHLSRSAATASVATLSGNMKSFVTRRENVLKDMAVVIERNMENCEAGLKDLCAESKI
DRFKSPPSVDLESINAKTVEKYNEWVAAARVWCNLILAQKHKIPRGDAFFPTRLKAYPGFPGSVIHKEATSFATAIKELRKCLA
DLKQSHQKLFGALSNEEWSLVLERFPAPEGTGGKGMRHQLGKTLAVLGKKHPEWKPRQYIEELVAGLERGADSMAKHLENRQFS
DRPAAIKLINLLNNACVVLMEPLRVKSLYKEYFEQDTPRRNAFGQARGSLAEPTDQADSLQILGFSLMDEVRGICRYDGFLAFA
GDKEKDQWAFFFDPDGPGGMGIADPVKHPKGSTDSGYIGFGTMGGSRKRAQAAEKRLVRERLWIRRDRKPLQLPLHFGTRQGRE
YLWNFDHGLKKSSDPWMLTNGRLLRIYPPNRPQFSDYFLTITLQKDTPPLAISSGEKLVGVDRGEQNPASFAVVDAKGRLLERG
NVGEKYTAKIRQFAEMKSDLQRTAGGYTRKLRAKERNTASALGGLVMRELLDLLVRHPGALVFERLSSGITTRGGRGTLMGNMH
YERILSGVEGKLAEAGCYKAPSAAKYRKGITPFLRFVNPAYTSATCSACGEVFSSSWYKKTAATISKESPGSWSVTLPNGKKLQ
LPCSYTSYMRGRGEKTWNTAERLEELFKDRTWSDLPPSTRKTVEGLVARLTHHRPKRGEFVCPSCGHKDDADLQAALNIARKSI
WVSSLPPRQAKQSEGEDRRSTEEPWRVWYKKQIMEKWS (SEQ ID NO: 7)
>3300019093|Ga0187843_10013171_2|M
[aquatic-freshwater]
MNHKSTVKASVRHLTRHALQKPGEESDPGETTKTLKFRVDAKGHTRTRLDQIFTAQRQFVRDLLNKLEGMWDKDPQRFIRMVES
SASDPFESKTSCYGWMMTKFLTGSDLPEHLSRSAATASVATLSGNMKSFVTRRENVLKDMAVVIERNMENCEAGLKDLCAELKI
DRFKSPPSVDLESINAKTVEKYNEWVAAARVWCNLILAQKHKIPRGDAFFPTRLKAYPGFPGSVIHKEATYFATAIKELRKCLA
DLKQSHQKLFGALSNEEWSLVLERFPAPEGTGGKGMRHQLGKTLAVLGKKHPEWKPRQYIEELVAGLERGADSMAKHLENRQFS
DRPAAIKLINLLNNACVVLMEPLRVKSLYKEYFEQDTPRRNAFGQARGSLAEPTDQADSLQILGFSLMDEVRGICRYDGFLAFA
GDKEKDQWAFFFDPDGPGGMGIADPVKHPKGSTDSGYIGFGTMGGSRKRAQAAEKRLVRERLWIRRDRKPLQLPLHFGTRQGRE
YLWNFDHGLKKSSDPWMLTNGRLLRIYPHNRPQFSDYFLTITLQKDTPPLAISSGEKLVGVDRGEQNPASFAVVDAKGRLLERG
NVGEKYTAKIRQFAEMKSDLQRTAGGYTRKLRAKERNTASALGGLVMRELLDLLVRHPGALVFERLSSGITTRGGRGTLMGNMH
YERILSGLRASWPRQVATRHPVPPSTAKESRRSCDL (SEQ ID NO: 8)
>3300023179|Ga0214923_10008431_2|P
[aquatic-freshwater]
MLNPAEMQMPSNSIKSIKASVRELYNHALNKQGDGEPGETTKTLKFKIDPSPENQIQLTKIFDAQRAFLRDVLQKLEGMWDKHP
EKIEEMANCSGSKPFEKKTSCYGWLLTKFLTGSDLPENLSRSAATASIGTLAGNLKSFLTRRKNVLKEMANTVSANAKLWDEDL
PIKCKEMDLDLFKAPPKIKVESLNAKTVDEYNEWVASARVWCNLILVQKNKVPRSDACFPKRLKAYPGFPFSVKHKETAKITDA
VKSLQDCLCELKKAHLKAFDSLTEVEWQSVLERFPSPKEVDGKGTRRLIGKTLAALHKKNPNWKPVDIVKELIAGMERSIQSLV
KHLEVREFTDRKAAIKLMNHMNHACVFLLEPLRVRNDYKGLYEKDTPRRNAFGEARGSLSEPTDEADSLQIIGFSLNERGGTRY
DGILAYSGEPGSQKWAFFFDPLGPEGMGLADEGKNPARTTLLPWVGFGTTGGARKKAQAKAKALVRGKIWVSPKRKPMALPLLF
GARQGREYLWNFDRGLKSSSTPWMLTNGRILRIFPYQKPELAEFYLTLTLQKDNPPLALSLGEHLIGVDRGEENPASYALVDAK
GRLVERGHIGQEYSQRIKTFAKEKAELQRSLGGYTRRLRAKERNIASALGGQVIRELMNLLVAKKGALVFENLSSGIVTRGGRG
TLMGNMHYERILSGIEQKLAEAGCYEVPNAKKYRKGVSPFVRFVNPSYTSSTCSKCGEVYSRAWYEKIAPSLERKGAGIWAVKL
GEKHFTLPLSYSYFLRGRGEQHKKTDERLTEILKGKDWAKLSATSKKEIVGLLQSKLVAYRPKRGKFNCPSCEHEDDADLQAAL
NIARKTIWVSTLPPKKAKSGDQDFRGVGQELWAKWYKDRVHKNWA (SEQ ID NO: 9)
>3300027730|Ga0247833_1032983_1|M
[aquatic-freshwater]
MNHKNTVKASVRELTRHALQKPGEESEPGETTKTLKFRVDAKGHTRTRLDQIFTAQRQFVRDLLTKLEGMWDKDPQRFIRMVES
SASDPFESKTSCYGWMMTKFLTGSDLPEHLSRSAATASVATLSGNMKSFVTRRENVLKDMAVVIERNMENCEAGLKDLCAELKI
DRFKSPPSVDLESINAKTVEKYNEWVAAARVWCNLILAQKHKIPRGDAFFPTRLKAYPGFPGSVIHKEATSFATAIKELRKCLA
DLKQSHQKLFDALSTEEWSLVLEKFPAPEGTGGKGMRHQLGKTLAVLGKKHPEWKPRQYIEELVAGLERGADSMAKHLKNRQFS
DRPAAIKLINLLNNACVVLMEPLRVKSLYKEYFEQDTPRRNAFGQARGSLAEPTDQADSLQILGFSLMDEVRGVCRYDGFLAFT
GDKGKDQWAFFFDPDGPGGMGIADPVKHPKGSSDSGYIGFGTMGGSRKRAQAAEKRLVRERLWIRRDRKPLQLPLHFGTRQGRE
YLWNFDHGLKKSSDPWMLTNGRLLRVYPPNRPQLSDYFLTITLQKDTPPLAISSGDKLVGVDRGEQNPASFAVVDDKGRLLERG
NVGEKYTAKIRQFAEMKSDLQRTAGGYTRKLRAKERNTASALGGLVMRELLDLLVRHPGALVFERLSSGITTRGGRGTLMGNMH
YERILSGVEGKLAEAGCYKAPSAAKYRKGITPFLRFVNPAYTSATCSACGEVFSSGWYKKTAATISKESLGSWSVTLPNGKKLQ
LPSSYTSYMRGRGEKTWNTAERLEELFQDRTWSDLPPSTRKTVEGLVARLTHHRPKRGEFVCSSCGHKDDADLQAALNIARKSI
WVSSLPPRQAKQSEGEDRRSTEEPWRVWYKKQIMGKWS (SEQ ID NO: 10)
>3300028114|Ga0247835_1021903_1|P
[aquatic-freshwater]
MNHKNTVKASVRELTRHALQKPGEESEPGETTKTLKFRVDAKGHTRTRLDQIFTAQRQFVRDLLTKLEGMWDKDPQRFIRMVES
SASDPFESKTSCYGWMMTKFLTGSDLPEHLSRSAATASVATLSGNMKSFVTRRENVLKDMAVVIERNMESFEAGLKDLCAELKI
DRFKSPPSVDLESINAKTVEKYNEWVAAARVWCNLILAQKHKIPRGDAFFPTRLKAYPGFPGSVIHKEATSFATAIKELRKCLA
DLKQSHQKLFDALSTEEWSLVLEKFPAPEGTGGKGMRHQLGKTLAVLGKKHPEWKPRQYIEELVAGLERGADSMAKHLKNRQFS
DRPAAIKLINLLNNACVVLMEPLRVKSLYKEYFEQDTPRRNAFGQARGSLAEPTDQADSLQILGFSLMDEVRGVCRYDGFLAFT
GDKGKDQWAFFFDPDGPGGMGIADPVKHPKGSSDSGYIGFGTMGGSRKRAQAAEKRLVRERLWIRRDRKPLQLPLHFGTRQGRE
YLWNFDHGLKKSSDPWMLTNGRLLRVYPPNRPQLSDYFLTITLQKDTPPLAISSGDKLVGVDRGEQNPASFAVVDDKGRLLERG
NVGEKYTAKIRQFAEMKSDLQRTAGGYTRKLRAKERNTASALGGLVMRELLDLLVRHPGALVFERLSSGITTRGGRGTLMGNMH
YERILSGVEGKLAEAGCYKAPSAAKYRKGITPFLRFVNPAYTSATCSACGEVFSSGWYKKTAATISKESLGSWSVTLPNGKKLQ
LPSSYTSYMRGRGEKTWNTAERLEELFQDRTWSDLPPSTRKTVEGLVARLTHHRPKRGEFVCSSCGHKDDADLQAALNIARKSI
WVSSLPPRQAKQSEGEDRRSTEEPWRVWYKKQIMGKWS (SEQ ID NO: 11)
>3300028553|Ga0247839_1034275_1|M
[aquatic-freshwater]
MNHKNTVKASVRELTRHALQKPGEESEPGETTKTLKFRVDAKGHTRTRLDQIFTAQRQFVRDLLTKLEGMWDKDPQRFIRMVES
SASDPFESKTSCYGWMMTKFLTGSDLPEHLSRSAATASVATLSGNMKSFVTRRENVLKDMAVVIERNMENCEAGLKDLCAELKI
DRFKSPPSVDLESINAKTVEKYNEWVAAARVWCNLILAQKHKIPRGDAFFPTRLKAYPGFPGSVIHKEATSFATAIKELRKCLA
DLKQSHQKLFDALSTEEWSLVLEKFPAPEGTGGKGMRHQLGKTLAVLGKKHPEWKPRQYIEELVAGLERGADSMAKHLKNRQFS
DRPAAIKLINLLNNACVVLMEPLRVKSLYKEYFEQDTPRRNAFGQARGSLAEPTDQADSLQILGFSLMDEVRGVCRYDGFLAFT
GDKGKDQWAFFFDPDGPGGMGIADPVKHPKGSSDSGYIGFGTMGGSRKRAQAAEKRLVRERLWIRRDRKPLQLPLHFGTRQGRE
YLWNFDHGLKKSSDPWMLTNGRLLRVYPPNRPQLSDYFLTITLQKDTPPLAISSGDKLVGVDRGEQNPASFAVVDDKGRLLERG
NVGEKYTAKIRQFAEMKSDLQRTAGGYTRKLRAKERNTASALGGLVMRELLDLLVRHPGALVFERLSSGITTRGGRGTLMGNMH
YERILSGVEGKLAEAGCYKAPSAAKYRKGITPFLRFVNPAYTSATCSACGEVFSSGWYKKTAATISKESLGSWSVTLPNGKKLQ
LPSSYTSYMRGRGEKTWNTAERLEELFQDRTWSDLPPSTRKTVEGLVARLTHHRPKRGEFVCSSCGHKDDADLQAALNIARKSI
WVSSLPPRQAKQSEGEDRRSTEEPWRVWYKKQIMGKWS (SEQ ID NO: 10)
>3300028569|Ga0247843_1031164_2|P
[aquatic-freshwater]
MNHKNTVKASVRELTRHALQKPGEESEPGETTKTLKFRVDAKGHTRTRLDQIFTAQRQFVRDLLTKLEGMWDKDPQRFIRMVES
SASDPFESKTSCYGWMMTKFLTGSDLPEHLSRSAATASVATLSGNMKSFVTRRENVLKDMAVVIERNMESFEAGLKDLCAELKI
DRFKSPPSVDLESINAKTVEKYNEWVAAARVWCNLILAQKHKIPRGDAFFPTRLKAYPGFPGSVIHKEATSFATAIKELRKCLA
DLKQSHQKLFDALSTEEWSLVLEKFPAPEGTGGKGMRHQLGKTLAVLGKKHPEWKPRQYIEELVAGLERGADSMAKHLKNRQFS
DRPAAIKLINLLNNACVVLMEPLRVKSLYKEYFEQDTPRRNAFGQARGSLAEPTDQADSLQILGFSLMDEVRGVCRYDGFLAFT
GDKGKDQWAFFFDPDGPGGMGIADPVKHPKGSSDSGYIGFGTMGGSRKRAQAAEKRLVRERLWIRRDRKPLQLPLHFGTRQGRE
YLWNFDHGLKKSSDPWMLTNGRLLRVYPPNRPQLSDYFLTITLQKDTPPLAISSGDKLVGVDRGEQNPASFAVVDDKGRLLERG
NVGEKYTAKIRQFAEMKSDLQRTAGGYTRKLRAKERNTASALGGLVMRELLDLLVRHPGALVFERLSSGITTRGGRGTLMGNMH
YERILSGVEGKLAEAGCYKAPSAAKYRKGITPFLRFVNPAYTSATCSACGEVFSSGWYKKTAATISKESLGSWSVTLPNGKKLQ
LPSSYTSYMRGRGEKTWNTAERLEELFQDRTWSDLPPSTRKTVEGLVARLTHHRPKRGEFVCSSCGHKDDADLQAALNIARKSI
WVSSLPPRQAKQSEGEDRRSTEEPWRVWYKKQIMGKWS (SEQ ID NO: 11)
>3300014164|Ga0181532_10001487_14|M
[aquatic-freshwater-bog]
MPQTIELKLFMNSIHKSVRSLLSLGLSRSASASPQTITRTVKFKINTDIRPELIPVLNRHFDAFEKFRRKVLDELEAWWNKKPD
DFTSMVRATAKERFQDKSSCYGWLYRHFLSGKDLPAGLTREAANSVLWSLKGGLKSFLTRRENVAKELEENYTTNANLWNESII
RIIRDHKLDKPTPPTAPPTVNFKKLTDDQIEKYNGWVGIVRMWGNLILHQQLVQKGLVDREDAKLPRRLKGYPGFPGSQRYLQG
ASLADSLKRLDDITGKFAKDSEKRFAKITSEHWGAVLERFFPPEAKEDETRRRPRTVKQMAAERLHYLCKHNPDWKPEQTAKEV
LAGLFRLADKLHAHLKNNSPHDRRAVIKLANVLNVAAVFSLEPLRASGDYIACFEADEPRRQAFADLRGALAQPGDDTVAIEVT
GFSLSSNSPQYCGLLACREIKPDCDEWAFFYTLDNQDLKIFAKPGPRPPRDFQPTNWHGFATKGSDDEKEIVRGTVWLPTEISK
TKPALALPLAFGARQGREYLWHFDRDLRTRNEWTPLNARLLRVMPAAQESESEKERALRANRADFYVTITFLRLAPPIASVKSK
ELIGVDRGEVVPAAFAVVGATGRFLAKPSRLREFMEYLRQLDNWEKLNLAHPENARENERKPRWEARPDDGFGFIAPEYRDQQR
EFNKLKRELQQTKGGYTRWLRAKERNRARALGGQVMRELLMLCATHKAPLVFESLGSGLATRGGKGTMMSQMQYSRVFTSVEQK
LAEAGLCAIARQPKFRKWDNGFIKLVGPACTSATCSVCGQVHSTSFYATIAATLKESSKGNWQVTLPNGKVRRLPKEYGYWLRG
KGEQTANTDERIHQLLNKPFAELSTTNHNALISLLKSRWLPFRPDQATFQCLACGYSVNADVQAALNIARKHLFRIGREKKSDE
ENEAARRKVMGEWETWYRQKLASVWNK (SEQ ID NO: 12)
>3300014164|Ga0181532_10001487_14|P
[aquatic-freshwater-bog]
MGLGRTFCLGHNLARSTKRREKEDECGNFRGWQNHVGFRLGHRLRIARRMPQTIELKLFMNSIHKSVRSLLSLGLSRSASASPQ
TITRTVKFKINTDIRPELIPVLNRHFDAFEKFRRKVLDELEAWWNKKPDDFTSMVRATAKERFQDKSSCYGWLYRHFLSGKDLP
AGLTREAANSVLWSLKGGLKSFLTRRENVAKELEENYTTNANLWNESIIRIIRDHKLDKPTPPTAPPTVNFKKLTDDQIEKYNG
WVGIVRMWGNLILHQQLVQKGLVDREDAKLPRRLKGYPGFPGSQRYLQGASLADSLKRLDDITGKFAKDSEKRFAKITSEHWGA
VLERFFPPEAKEDETRRRPRTVKQMAAERLHYLCKHNPDWKPEQTAKEVLAGLFRLADKLHAHLKNNSPHDRRAVIKLANVLNV
AAVFSLEPLRASGDYIACFEADEPRRQAFADLRGALAQPGDDTVAIEVTGFSLSSNSPQYCGLLACREIKPDCDEWAFFYTLDN
QDLKIFAKPGPRPPRDFQPTNWHGFATKGSDDEKEIVRGTVWLPTEISKTKPALALPLAFGARQGREYLWHFDRDLRTRNEWTP
LNARLLRVMPAAQESESEKERALRANRADFYVTITFLRLAPPIASVKSKELIGVDRGEVVPAAFAVVGATGRFLAKPSRLREFM
EYLRQLDNWEKLNLAHPENARENERKPRWEARPDDGFGFIAPEYRDQQREFNKLKRELQQTKGGYTRWLRAKERNRARALGGQV
MRELLMLCATHKAPLVFESLGSGLATRGGKGTMMSQMQYSRVFTSVEQKLAEAGLCAIARQPKFRKWDNGFIKLVGPACTSATC
SVCGQVHSTSFYATIAATLKESSKGNWQVTLPNGKVRRLPKEYGYWLRGKGEQTANTDERIHQLLNKPFAELSTTNHNALISLL
KSRWLPFRPDQATFQCLACGYSVNADVQAALNIARKHLFRIGREKKSDEENEAARRKVMGEWETWYRQKLASVWNK (SEQ ID
NO: 13)
>3300014165|Ga0181523_10000360_35|M
[aquatic-freshwater-bog]
MPQTIELKLFMNSIHKSVRSLLSLGLSRSASASPQTITRTVKFKINTDIRPELIPVLNRHFDAFEKFRRKVLDELEAWWNKKPD
DFTSMVRATAKERFQDKSSCYGWLYRHFLSGKDLPAGLTREAANSVLWSLKGGLKSFLTRRENVAKELEENYTTNANLWNESII
RIIRDHKLDKPTPPTAPPTVNFKKLTDDQIEKYNGWVGIVRMWGNLILHQQLVQKGLVDREDAKLPRRLKGYPGFPGSQRYLQG
ASLADSLKRLDDITGKFAKDSEKRFAKITSEHWGAVLERFFPPEAKEDETRRRPRTVKQMAAERLHYLCKHNPDWKPEQTAKEV
LAGLFRLADKLHAHLKNNSPHDRRAVIKLANVLNVAAVFSLEPLRASGDYIACFEADEPRRQAFADLRGALAQPGDDTVAIEVT
GFSLSSNSPQYCGLLACREIKPDCDEWAFFYTLDNQDLKIFAKPGPRPPRDFQPTNWHGFATKGSDDEKEIVRGTVWLPTEISK
TKPALALPLAFGARQGREYLWHFDRDLRTRNEWTPLNARLLRVMPAAQESESEKERALRANRADFYVTITFLRLAPPIASVKSK
ELIGVDRGEVVPAAFAVVGATGRFLAKPSRLREFMEYLRQLDNWEKLNLAHPENARENERKPRWEARPDDGFGFIAPEYRDQQR
EFNKLKRELQQTKGGYTRWLRAKERNRARALGGQVMRELLMLCATHKAPLVFESLGSGLATRGGKGTMMSQMQYSRVFTSVEQK
LAEAGLCAIARQPKFRKWDNGFIKLVGPACTSATCSVCGQVHSTSFYATIAATLKESSKGNWQVTLPNGKVRRLPKEYGYWLRG
KGEQTANTDERIHQLLNKPFAELSTTNHNALISLLKSRWLPFRPDQATFQCLACGYSVNADVQAALNIARKHLFRIGREKKSDE
ENEAARRKVMGEWETWYRQKLASVWNK (SEQ ID NO: 12)
>3300014165|Ga0181523_10000360_33|P
[aquatic-freshwater-bog]
MGLGRTFCLGHNLARSTKRREKEDECGNFRGWQNHVGFRLGHRLRIARRMPQTIELKLFMNSIHKSVRSLLSLGLSRSASASPQ
TITRTVKFKINTDIRPELIPVLNRHFDAFEKFRRKVLDELEAWWNKKPDDFTSMVRATAKERFQDKSSCYGWLYRHFLSGKDLP
AGLTREAANSVLWSLKGGLKSFLTRRENVAKELEENYTTNANLWNESIIRIIRDHKLDKPTPPTAPPTVNFKKLTDDQIEKYNG
WVGIVRMWGNLILHQQLVQKGLVDREDAKLPRRLKGYPGFPGSQRYLQGASLADSLKRLDDITGKFAKDSEKRFAKITSEHWGA
VLERFFPPEAKEDETRRRPRTVKQMAAERLHYLCKHNPDWKPEQTAKEVLAGLFRLADKLHAHLKNNSPHDRRAVIKLANVLNV
AAVFSLEPLRASGDYIACFEADEPRRQAFADLRGALAQPGDDTVAIEVTGFSLSSNSPQYCGLLACREIKPDCDEWAFFYTLDN
QDLKIFAKPGPRPPRDFQPTNWHGFATKGSDDEKEIVRGTVWLPTEISKTKPALALPLAFGARQGREYLWHFDRDLRTRNEWTP
LNARLLRVMPAAQESESEKERALRANRADFYVTITFLRLAPPIASVKSKELIGVDRGEVVPAAFAVVGATGRFLAKPSRLREFM
EYLRQLDNWEKLNLAHPENARENERKPRWEARPDDGFGFIAPEYRDQQREFNKLKRELQQTKGGYTRWLRAKERNRARALGGQV
MRELLMLCATHKAPLVFESLGSGLATRGGKGTMMSQMQYSRVFTSVEQKLAEAGLCAIARQPKFRKWDNGFIKLVGPACTSATC
SVCGQVHSTSFYATIAATLKESSKGNWQVTLPNGKVRRLPKEYGYWLRGKGEQTANTDERIHQLLNKPFAELSTTNHNALISLL
KSRWLPFRPDQATFQCLACGYSVNADVQAALNIARKHLFRIGREKKSDEENEAARRKVMGEWETWYRQKLASVWNK (SEQ ID
NO: 13)
>3300014200|Ga0181526_10000193_31|M
[aquatic-freshwater-bog]
MPQTIELKLFMNSIHKSVRSLLSLGLSRSASASPQTITRTVKFKINTDIRPELIPVLNRHFDAFEKFRRKVLDELEAWWNKKPD
DFTSMVRATAKERFQDKSSCYGWLYRHFLSGKDLPAGLTREAANSVLWSLKGGLKSFLTRRENVAKELEENYTTNANLWNESII
RIIRDHKLDKPTPPTAPPTVNFKKLTDDQIEKYNGWVGIVRMWGNLILHQQLVQKGLVDREDAKLPRRLKGYPGFPGSQRYLQG
ASLADSLKRLDDITGKFAKDSEKRFAKITSEHWGAVLERFFPPEAKEDETRRRPRTVKQMAAERLHYLCKHNPDWKPEQTAKEV
LAGLFRLADKLHAHLKNNSPHDRRAVIKLANVLNVAAVFSLEPLRASGDYIACFEADEPRRQAFADLRGALAQPGDDTVAIEVT
GFSLSSNSPQYCGLLACREIKPDCDEWAFFYTLDNQDLKIFAKPGPRPPRDFQPTNWHGFATKGSDDEKEIVRGTVWLPTEISK
TKPALALPLAFGARQGREYLWHFDRDLRTRNEWTPLNARLLRVMPAAQESESEKERALRANRADFYVTITFLRLAPPIASVKSK
ELIGVDRGEVVPAAFAVVGATGRFLAKPSRLREFMEYLRQLDNWEKLNLAHPENARENERKPRWEARPDDGFGFIAPEYRDQQR
EFNKLKRELQQTKGGYTRWLRAKERNRARALGGQVMRELLMLCATHKAPLVFESLGSGLATRGGKGTMMSQMQYSRVFTSVEQK
LAEAGLCAIARQPKFRKWDNGFIKLVGPACTSATCSVCGQVHSTSFYATIAATLKESSKGNWQVTLPNGKVRRLPKEYGYWLRG
KGEQTANTDERIHQLLNKPFAELSTTNHNALISLLKSRWLPFRPDQATFQCLACGYSVNADVQAALNIARKHLFRIGREKKSDE
ENEAARRKVMGEWETWYRQKLASVWNK (SEQ ID NO: 12)
>3300014200|Ga0181526_10000193_30|P
[aquatic-freshwater-bog]
MGLGRTFCLGHNLARSTKRREKEDECGNFRGWQNHVGFRLGHRLRIARRMPQTIELKLFMNSIHKSVRSLLSLGLSRSASASPQ
TITRTVKFKINTDIRPELIPVLNRHFDAFEKFRRKVLDELEAWWNKKPDDFTSMVRATAKERFQDKSSCYGWLYRHFLSGKDLP
AGLTREAANSVLWSLKGGLKSFLTRRENVAKELEENYTTNANLWNESIIRIIRDHKLDKPTPPTAPPTVNFKKLTDDQIEKYNG
WVGIVRMWGNLILHQQLVQKGLVDREDAKLPRRLKGYPGFPGSQRYLQGASLADSLKRLDDITGKFAKDSEKRFAKITSEHWGA
VLERFFPPEAKEDETRRRPRTVKQMAAERLHYLCKHNPDWKPEQTAKEVLAGLFRLADKLHAHLKNNSPHDRRAVIKLANVLNV
AAVFSLEPLRASGDYIACFEADEPRRQAFADLRGALAQPGDDTVAIEVTGFSLSSNSPQYCGLLACREIKPDCDEWAFFYTLDN
QDLKIFAKPGPRPPRDFQPTNWHGFATKGSDDEKEIVRGTVWLPTEISKTKPALALPLAFGARQGREYLWHFDRDLRTRNEWTP
LNARLLRVMPAAQESESEKERALRANRADFYVTITFLRLAPPIASVKSKELIGVDRGEVVPAAFAVVGATGRFLAKPSRLREFM
EYLRQLDNWEKLNLAHPENARENERKPRWEARPDDGFGFIAPEYRDQQREFNKLKRELQQTKGGYTRWLRAKERNRARALGGQV
MRELLMLCATHKAPLVFESLGSGLATRGGKGTMMSQMQYSRVFTSVEQKLAEAGLCAIARQPKFRKWDNGFIKLVGPACTSATC
SVCGQVHSTSFYATIAATLKESSKGNWQVTLPNGKVRRLPKEYGYWLRGKGEQTANTDERIHQLLNKPFAELSTTNHNALISLL
KSRWLPFRPDQATFQCLACGYSVNADVQAALNIARKHLFRIGREKKSDEENEAARRKVMGEWETWYRQKLASVWNK (SEQ ID
NO: 13)
>3300027720|Ga0209617_10001817_3|M
[aquatic-freshwater-freshwater and sediment]
MNHKSTVKASVRHLTRHALQKPGEESDPGETTKTLKFRVDAKAHTRTRLDQIFTAQRQFVRDLLNKLEGMWDKDPQRFIRMVES
SASDPFESKTSCYGWMMTKFLTGSDLPEHLSRSAATASVATLSGNMKSFVTRRENVLKDMAVVIERNMENCEAGLKDLCAELKI
DRFKSPPSVDLESINAKTVEKYNEWVAAARVWCNLILAQKHKIPRGDAFFPTRLKAYPGFPGSVIHKEATSFATAIKELRKCLA
DLKQSHQKLFDALSNEEWSLVLERFPAPEGTGGKGMRHQLGKTLAVLGKKHPEWKPRQFIEELVAGLERGADSMAKHLENRQFS
DRPAAIKLINLLNNACVVLMEPLRVKSLYKEYFEQDTPRRNAFGQARGSLAEPTDQADSLQILGFSLMDEVRGICRYDGFLAFA
GDKGKDQWAFFFDPDGPGGMGIADPVKHPKGSSDSGYIGFGTMGGSRKRAQAAEKRLVRERLWIRRDRKPLQLPLHFGTRQGRE
YLWNFDHGLKKSSDPWMLTNGRLLRIYPPNRPQFSDYFLTITLQKDTPPLAISSGEKLVGVDRGEQNPASFAVVDAKGRLLERG
NVGEKYTAKIRQFAEMKSDLQRTAGGYTRKLRAKERNTASALGGLVMRELLDLLVRHPGALVFERLSSGITTRGGRGTLMGNMH
YERILSGVEGKLAEAGCYKAPSAAKYRKGITPFLRFVNPAYTSATCSACGEVFSSSWYKKTAATISKESPGSWSVTLPNGKKLQ
LPCSYTSYMRGRGEKTWNTAERLEELFKDRTWSDLPPSTRKTVEGLVARLTHHRPKRGEFVCPSCGHKDDADLQAALNIARKSI
WVSSLPPRQAKQSEGEDRRSTEEPWRVWYKKQIMEKWS (SEQ ID NO: 14)
>3300009764|Ga0116134_1001531_13|P
[aquatic-freshwater-peatland]
MKAKYRSNSIHASLRQLLELGLSKSSSAEPQKITRTAKFKINTDIRPDLVPVLNRHFDAFEKFRRKVLDELEARWNKDQKSFQA
MVQCSAKEPYQKKSSCYAWLDTHFITEAKAVLDLPRKPATSLLYNLSGGLKGFLTRRETVTEDIQKRFNDNLREWNGDLSQLAS
DLKAPLPPAPPNLDFENLTERAIERYNDWVGRTRAWCNLILVQQKKVERRDACLPRYLKGYPGFFGSQRYATTASLAENLKKLE
QEAREQSKKAPTRFAKLSPEIWTAIQERFSPPEGHEAGEKRRPRTAHQTVCLRFAALRAAHPEWTPAQLAGEILAGIFHGTEKL
KKHLAANGFEDRRAVIKLANLYNVVVAFSLDPIRAAGNYISFYKEETPKRNAFGDVRGGLHQPSDESAAIEIMGFGLQKESGKP
LYNGLLVCKKSEKEHDDSWAFLYCHTEGQMFELANEKAKLRGKLLTDWTGFASRGGSRKKAEASAKQLVRGRVWISEKTPPTVM
PLAFGSRQGREYLWHFDRDLREKNEWVLGNGRLLRIMPPGRPNAADFYLTITLERQAPPVAEFIASKLIGIDRGEAVPAAYALI
DREGRWLVNQKRFQEFLKALGTWHDELDEWWKKNKNTPINDRVKRPRLQWTSELEDGFGFVASEYREQQADFNDQKRELQRTQG
GYTRWLRSKERNRARALGGEVTRAVLSLASEHRSPLVLEKLGSALATRGGKGTMMSQMQYERMLTTLEQKLAEVGLYAMPSAPK
YRKLTNGFINFAAPHYTSSTCSSCGQVHDSIFYNELAKKIVRPNDSKWQVTLPSGQTRTLPQTYSYWLKGKGEQTKQTNERLNE
LLGERTVTQLSKSSYMTLVSLLKNSWLPYRPQQADFCCLNCGYTTNADVQGALNIARKFLFRSERGKKTDDAGEEGEAKRGKYK
DDWQTWYRQKLEKVWCK (SEQ ID NO: 15)
>3300018009|Ga0187884_10009678_2|M
[aquatic-freshwater-peatland]
MKAKYRSNSIHASLRQLLELGLSKSSSAEPQKITRTAKFKINTDIRPDLVPVLNRHFDAFEKFRRKVLDELEARWNKDQKSFQA
MVQCSAKEPYQKKSSCYAWLDTHFITEAKAVLDLPRKPATSLLYNLSGGLKGFLTRRETVTEDIQKRFNDNLREWNGDLSQLAS
DLKAPLPPAPPNLDFENLTERAIERYNDWVGRTRAWCNLILVQQKKVERRDACLPRYLKGYPGFFGSQRYATTASLAENLKKLE
QEAREQSKKAPTRFAKLSPEIWTAIQERFSPPEGHEAGEKRRPRTAHQTVCLRFAALRAAHPEWTPAQLAGEILAGIFHGTEKL
KKHLAANGFEDRRAVIKLANLYNVVVAFSLDPIRAAGNYISFYKEETPKRNAFGDVRGGLHQPSDESAAIEIMGFGLQKESGKP
LYNGLLVCKKSEKEHDDSWAFLYCHTEGQMFELANEKAKLRGKLLTDWTGFASRGGSRKKAEASAKQLVRGRVWISEKTPPTVM
PLAFGSRQGREYLWHFDRDLREKNEWVLGNGRLLRIMPPGRPNAADFYLTITLERQAPPVAEFIASKLIGIDRGEAVPAAYALI
DREGRWLVNQKRFQEFLKALGTWHDELDEWWKKNKNTPINDRVKRPRLQWTSELEDGFGFVASEYREQQADFNDQKRELQRTQG
GYTRWLRSKERNRARALGGEVTRAVLSLASEHRSPLVLEKLGSALATRGGKGTMMSQMQYERMLTTLEQKLAEVGLYAMPSAPK
YRKLTNGFINFAAPHYTSSTCSSCGQVHDSIFYNELAKKIVRPNDSKWQVTLPSGQTRTLPQTYSYWLKGKGEQTKQTNERLNE
LLGERTVTQLSKSSYMTLVSLLKNSWLPYRPQQADFCCLNCGYTTNADVQGALNIARKFLFRSERGKKTDDAGEEGEAKRGKYK
DDWQTWYRQKLEKVWCK (SEQ ID NO: 15)
>3300018014|Ga0187860_1004616_12|M
[aquatic-freshwater-peatland]
MKAKYRSNSIHASLRQLLELGLSKSSSAEPQKITRTAKFKINTDIRPDLVPVLNRHFDAFEKFRRKVLDELEARWNKDQKSFQA
MVQCSAKEPYQKKSSCYAWLDTHFITEAKAVLDLPRKPATSLLYNLSGGLKGFLTRRETVTEDIQKRFNDNLREWNGDLSQLAS
DLKAPLPPAPPNLDFENLTERAIERYNDWVGRTRAWCNLILVQQKKVERRDACLPRYLKGYPGFFGSQRYATTASLAENLKKLE
QEAREQSKKAPTRFAKLSPEIWTAIQERFSPPEGHEAGEKRRPRTAHQTVCLRFAALRAAHPEWTPAQLAGEILAGIFHGTEKL
KKHLAANGFEDRRAVIKLANLYNVVVAFSLDPIRAAGNYISFYKEETPKRNAFGDVRGGLHQPSDESAAIEIMGFGLQKESGKP
LYNGLLVCKKSEKEHDDSWAFLYCHTEGQMFELANEKAKLRGKLLTDWTGFASRGGSRKKAEASAKQLVRGRVWISEKTPPTVM
PLAFGSRQGREYLWHFDRDLREKNEWVLGNGRLLRIMPPGRPNAADFYLTITLERQAPPVAEFIASKLIGIDRGEAVPAAYALI
DREGRWLVNQKRFQEFLKALGTWHDELDEWWKKNKNTPINDRVKRPRLQWTSELEDGFGFVASEYREQQADFNDQKRELQRTQG
GYTRWLRSKERNRARALGGEVTRAVLSLASEHRSPLVLEKLGSALATRGGKGTMMSQMQYERMLTTLEQKLAEVGLYAMPSAPK
YRKLTNGFINFAAPHYTSSTCSSCGQVHDSIFYNELAKKIVRPNDSKWQVTLPSGQTRTLPQTYSYWLKGKGEQTKQTNERLNE
LLGERTVTQLSKSSYMTLVSLLKNSWLPYRPQQADFCCLNCGYTTNADVQGALNIARKFLFRSERGKKTDDAGEEGEAKRGKYK
DDWQTWYRQKLEKVWCK (SEQ ID NO: 15)
>3300018016|Ga0187880_1008327_2|M
[aquatic-freshwater-peatland]
MKAKYRSNSIHASLRQLLELGLSKSSSAEPQKITRTAKFKINTDIRPDLVPVLNRHFDAFEKFRRKVLDELEARWNKDQKSFQA
MVQCSAKEPYQKKSSCYAWLDTHFITEAKAVLDLPRKPATSLLYNLSGGLKGFLTRRETVTEDIQKRFNDNLREWNGDLSQLAS
DLKAPLPPAPPNLDFENLTERAIERYNDWVGRTRAWCNLILVQQKKVERRDACLPRYLKGYPGFFGSQRYATTASLAENLKKLE
QEAREQSKKAPTRFAKLSPEIWTAIQERFSPPEGHEAGEKRRPRTAHQTVCLRFAALRAAHPEWTPAQLAGEILAGIFHGTEKL
KKHLAANGFEDRRAVIKLANLYNVVVAFSLDPIRAAGNYISFYKEETPKRNAFGDVRGGLHQPSDESAAIEIMGFGLQKESGKP
LYNGLLVCKKSEKEHDDSWAFLYCHTEGQMFELANEKAKLRGKLLTDWTGFASRGGSRKKAEASAKQLVRGRVWISEKTPPTVM
PLAFGSRQGREYLWHFDRDLREKNEWVLGNGRLLRIMPPGRPNAADFYLTITLERQAPPVAEFIASKLIGIDRGEAVPAAYALI
DREGRWLVNQKRFQEFLKALGTWHDELDEWWKKNKNTPINDRVKRPRLQWTSELEDGFGFVASEYREQQADFNDQKRELQRTQG
GYTRWLRSKERNRARALGGEVTRAVLSLASEHRSPLVLEKLGSALATRGGKGTMMSQMQYERMLTTLEQKLAEVGLYAMPSAPK
YRKLTNGFINFAAPHYTSSTCSSCGQVHDSIFYNELAKKIVRPNDSKWQVTLPSGQTRTLPQTYSYWLKGKGEQTKQTNERLNE
LLGERTVTQLSKSSYMTLVSLLKNSWLPYRPQQADFCCLNCGYTTNADVQGALNIARKFLFRSERGKKTDDAGEEGEAKRGKYK
DDWQTWYRQKLEKVWCK (SEQ ID NO: 15)
>3300018017|Ga0187872_10010132_5|M
[aquatic-freshwater-peatland]
MKAKYRSNSIHASLRQLLELGLSKSSSAEPQKITRTAKFKINTDIRPDLVPVLNRHFDAFEKFRRKVLDELEARWNKDQKSFQA
MVQCSAKEPYQKKSSCYAWLDTHFITEAKAVLDLPRKPATSLLYNLSGGLKGFLTRRETVTEDIQKRFNDNLREWNGDLSQLAS
DLKAPLPPAPPNLDFENLTERAIERYNDWVGRTRAWCNLILVQQKKVERRDACLPRYLKGYPGFFGSQRYATTASLAENLKKLE
QEAREQSKKAPTRFAKLSPEIWTAIQERFSPPEGHEAGEKRRPRTAHQTVCLRFAALRAAHPEWTPAQLAGEILAGIFHGTEKL
KKHLAANGFEDRRAVIKLANLYNVVVAFSLDPIRAAGNYISFYKEETPKRNAFGDVRGGLHQPSDESAAIEIMGFGLQKESGKP
LYNGLLVCKKSEKEHDDSWAFLYCHTEGQMFELANEKAKLRGKLLTDWTGFASRGGSRKKAEASAKQLVRGRVWISEKTPPTVM
PLAFGSRQGREYLWHFDRDLREKNEWVLGNGRLLRIMPPGRPNAADFYLTITLERQAPPVAEFIASKLIGIDRGEAVPAAYALI
DREGRWLVNQKRFQEFLKALGTWHDELDEWWKKNKNTPINDRVKRPRLQWTSELEDGFGFVASEYREQQADFNDQKRELQRTQG
GYTRWLRSKERNRARALGGEVTRAVLSLASEHRSPLVLEKLGSALATRGGKGTMMSQMQYERMLTTLEQKLAEVGLYAMPSAPK
YRKLTNGFINFAAPHYTSSTCSSCGQVHDSIFYNELAKKIVRPNDSKWQVTLPSGQTRTLPQTYSYWLKGKGEQTKQTNERLNE
LLGERTVTQLSKSSYMTLVSLLKNSWLPYRPQQADFCCLNCGYTTNADVQGALNIARKFLFRSERGKKTDDAGEEGEAKRGKYK
DDWQTWYRQKLEKVWCK (SEQ ID NO: 15)
>3300018022|Ga0187864_10004559_12|P
[aquatic-freshwater-peatland]
MKAKYRSNSIHASLRQLLELGLSKSSSAEPQKITRTAKFKINTDIRPDLVPVLNRHFDAFEKFRRKVLDELEARWNKDQKSFQA
MVQCSAKEPYQKKSSCYAWLDTHFITEAKAVLDLPRKPATSLLYNLSGGLKGFLTRRETVTEDIQKRFNDNLREWNGDLSQLAS
DLKAPLPPAPPNLDFENLTERAIERYNDWVGRTRAWCNLILVQQKKVERRDACLPRYLKGYPGFFGSQRYATTASLAENLKKLE
QEAREQSKKAPTRFAKLSPEIWTAIQERFSPPEGHEAGEKRRPRTAHQTVCLRFAALRAAHPEWTPAQLAGEILAGIFHGTEKL
KKHLAANGFEDRRAVIKLANLYNVVVAFSLDPIRAAGNYISFYKEETPKRNAFGDVRGGLHQPSDESAAIEIMGFGLQKESGKP
LYNGLLVCKKSEKEHDDSWAFLYCHTEGQMFELANEKAKLRGKLLTDWTGFASRGGSRKKAEASAKQLVRGRVWISEKTPPTVM
PLAFGSRQGREYLWHFDRDLREKNEWVLGNGRLLRIMPPGRPNAADFYLTITLERQAPPVAEFIASKLIGIDRGEAVPAAYALI
DREGRWLVNQKRFQEFLKALGTWHDELDEWWKKNKNTPINDRVKRPRLQWTSELEDGFGFVASEYREQQADFNDQKRELQRTQG
GYTRWLRSKERNRARALGGEVTRAVLSLASEHRSPLVLEKLGSALATRGGKGTMMSQMQYERMLTTLEQKLAEVGLYAMPSAPK
YRKLTNGFINFAAPHYTSSTCSSCGQVHDSIFYNELAKKIVRPNDSKWQVTLPSGQTRTLPQTYSYWLKGKGEQTKQTNERLNE
LLGERTVTQLSKSSYMTLVSLLKNSWLPYRPQQADFCCLNCGYTTNADVQGALNIARKFLFRSERGKKTDDAGEEGEAKRGKYK
DDWQTWYRQKLEKVWCK (SEQ ID NO: 15)
>3300018040|Ga0187862_10006434_12|P
[aquatic-freshwater-peatland]
MKAKYRSNSIHASLRQLLELGLSKSSSAEPQKITRTAKFKINTDIRPDLVPVLNRHFDAFEKFRRKVLDELEARWNKDQKSFQA
MVQCSAKEPYQKKSSCYAWLDTHFITEAKAVLDLPRKPATSLLYNLSGGLKGFLTRRETVTEDIQKRFNDNLREWNGDLSQLAS
DLKAPLPPAPPNLDFENLTERAIERYNDWVGRTRAWCNLILVQQKKVERRDACLPRYLKGYPGFFGSQRYATTASLAENLKKLE
QEAREQSKKAPTRFAKLSPEIWTAIQERFSPPEGHEAGEKRRPRTAHQTVCLRFAALRAAHPEWTPAQLAGEILAGIFHGTEKL
KKHLAANGFEDRRAVIKLANLYNVVVAFSLDPIRAAGNYISFYKEETPKRNAFGDVRGGLHQPSDESAAIEIMGFGLQKESGKP
LYNGLLVCKKSEKEHDDSWAFLYCHTEGQMFELANEKAKLRGKLLTDWTGFASRGGSRKKAEASAKQLVRGRVWISEKTPPTVM
PLAFGSRQGREYLWHFDRDLREKNEWVLGNGRLLRIMPPGRPNAADFYLTITLERQAPPVAEFIASKLIGIDRGEAVPAAYALI
DREGRWLVNQKRFQEFLKALGTWHDELDEWWKKNKNTPINDRVKRPRLQWTSELEDGFGFVASEYREQQADFNDQKRELQRTQG
GYTRWLRSKERNRARALGGEVTRAVLSLASEHRSPLVLEKLGSALATRGGKGTMMSQMQYERMLTTLEQKLAEVGLYAMPSAPK
YRKLTNGFINFAAPHYTSSTCSSCGQVHDSIFYNELAKKIVRPNDSKWQVTLPSGQTRTLPQTYSYWLKGKGEQTKQTNERLNE
LLGERTVTQLSKSSYMTLVSLLKNSWLPYRPQQADFCCLNCGYTTNADVQGALNIARKFLFRSERGKKTDDAGEEGEAKRGKYK
DDWQTWYRQKLEKVWCK (SEQ ID NO: 15)
>OCZT010053476_2|M
[soil metagenome]
MSKEPRKNSTHASLRQLLELGLSKSSSAEPQKITRTVKFKIHTLARPELVAPLNKHFNAFDQFREKVLAELESWWDKDPDSFTH
MVKCSTKLKFEEKSSCYAWLYKKFLTGAELPPELSRDAANAMLDNLGGGLKSFLTRRATVSLEIKKRYEQNKEEWEKELSLIAK
ERNLKLPEVPREIDFNNLTAKKIDFYNEWVGLVRMWCNLILIQKEKLTRENACLPRYLKSYPGFPGSQRFRKPVTIEQTLAELE
TIAREQAGKASQRFADLKPEVWQAIQERFSPPKKEEAETTPRPRTASQTVSRRFTALIQANPNWKPQQIAEEILAGIFRAADKL
KKHLVTTKYTDRRATIKFANLFNVAVVFAREPFRARGDYVASYEADIARQKAFGDLRGALHQPSDESSAIQISGFSIKDGGTPN
YNGLLVCKSEANGKDSWAFLYCHQEGQIFQLADEKAKLRGKKLSEWTGFASRGGSRKKAEASPKQLVKSSVWVSEKNPPTVLPL
AFGTRLGREYLWHFDRNLRTKSEWVLGNGRLLRVMPPGRTDLAEFYLAITMERETPPVASVVANKLIGIDRGEAVPASYAVVDG
EERLLDSGRIAENYREEQRAFNKSKRELQSERGGYTRTLRSKERNRARALGGEVTRKLLSLAAEHCAPLVLENLNSSLATRGGK
NTMMSQMQYERVFTALEQKLAEAGLYSLPSAPKFRKGDNAFIKLVGPAYTSQTCSACGHVHWAEFYEKILDTLAPCGEKQWQVT
VEGKARTLPESYTYWLRGKGEQTKNTHERIIELLKDRPVSKLNKTDRKSLVSLFKNRWMPYRPKQADFQCVVCGHKMNADEQGA
LNIARKFLFASGRGKKSGEMTEAERRKVRGEWEKWYKEKLATVWKKQ (SEQ ID NO: 16)
>3300014839|Ga0182027_10014967_5|M
[terrestrial-soil-fen]
MSKEYRPDSIHASLRHLLELGLSKTGSSEPQKITRTVKFKVHTLARPELVAPLNQHFNAFDEFRHKVLADLESWWDKAPDSFTR
MVKSSTKAKYEEKSSCYAWLYRKYLTGAELPTELSRDAANAMLDNLAGSLKSFLTRRATVSLEIKKRYEQNREEWEKELSLVAK
EKNLTLPKPPPEIDFDHLNVMAIGLYNEWVGLVRMWCNLILIQKEKLTRENACLPRYLKSYPGFPGSQRFRKPVTIEQTFGELE
AAARDQAGNATNRFANVKPEVWQAIEERFKPPAKDEVEIEARPRSRTASQTVARRLAALVKANPNWTPDQLAVEILAGIFRAAD
KLQKHLAATEYTDHRATIKLANLFNAAVVFAREPFRASGDYVASYGADMARQKAFGDLRGALHQPSDESSAIQITGFSVNEDGS
PNYNGLLVCKPEADGKDSWAFLYCHQEGQTFQLADEKAKLRGKKLSEWTGFASRGGSRKKAEASAKQLVKGRVWVSEKKPPTVL
PLAFGTRMGREYLWHFDRNLRTKSAWVLGNGRLLRVMPPARPDLAEFYLTITMEREAPPVASVVANKLIGIDRGEAVPAAYAVV
DSEGRLLDSGRIAEKYREEQRAFNKSKRELQSERGGYTRTLRSKERNRARALGGEVTRRLLSLAAEHRAPLVLENLNSSLATRG
GKNTMMSQMQYERVFTALEQKLAEAGLYSLPSAPKYRKGDNAFIKLVGPAYTSQTCSACGHVHSSEFYDQLTDTLAPCGDKQWR
VTVEGKPRILPESYTYWLRGKGDQTRNTNERIVELLKDRPISKLTKTDRKSLVSLVKNRWMQYRPTQADFQCVVCGHKMNADEQ
GALNIARKFLFALGRGKKSGEMTEAERRKVRGEWEKWYKEKLGTVWRK (SEQ ID NO: 17)

TABLE 3
Nucleotide sequences of Representative
CLUST.121143 Direct Repeats

| | Direct Repeat |
|---|---|
| CLUST.121143 Effector Protein | Nucleotide |
| Accession | Sequence |
| 3300013006\|Ga0164294_0029128_3\|M | GGTTTGCTGACCTCG |
| (SEQ ID NO: 1) | ATTGTTGGAGGAGTG |
| | CAAAAG |
| | (SEQ ID NO: 101) |
| 3300013087\|Ga0163212_1009539_3\|M | GGTTTCGCACTCCCT |
| (SEQ ID NO: 2) | CATTGTTGGTGGTGT |
| | GCAAAAG |
| | (SEQ ID NO: 102) |
| 3300013131\|Ga0172373_10014249_3\|P | GGTTTGCTCCGGTCC |
| (SEQ ID NO: 3) | TTGTTGGTAGGTGTG |
| | CAAAAG |
| | (SEQ ID NO: 103) |
| 3300013131\|Ga0172373_10021309_4\|M | GGTTAGCTCCCATCC |
| (SEQ ID NO: 4) | TTGTTGGGTGGTTTG |
| | CAAAAG |
| | (SEQ ID NO: 104) |
| 3300013132\|Ga0172372_10046622_2\|M | GGTTAGCTCCCATCC |
| (SEQ ID NO: 4) | TTGTTGGGTGGTTTG |
| | CAAAAG |
| | (SEQ ID NO: 104) |
| 3300014720\|Ga0172376_10007396_6\|M | GGTTTGCTCCGGTCC |
| (SEQ ID NO: 3) | TTGTTGGTAGGTGTG |
| | CAAAAG |
| | (SEQ ID NO: 103) |
| 3300014720\|Ga0172376_10013958_4\|M | GGTTAGCTCCCATCC |
| (SEQ ID NO: 4) | TTGTTGGGTGGTTTG |
| | CAAAAG |
| | (SEQ ID NO: 104) |
| 3300018790\|Ga0187842_1006374_2\|M | GGTTTGCTGACCTCG |
| (SEQ ID NO: 5) | ATTGTTGGAGGAGTG |
| | CAAAAG |
| | (SEQ ID NO: 101) |
| 3300018815\|Ga0187845_1009203_1\|M | GGTTTGCTGACCTCG |
| (SEQ ID NO: 6) | ATTGTTGGAGGAGTG |
| | CAAAAG |
| | (SEQ ID NO: 101) |
| 3300018868\|Ga0187844_10013314_2\|M | GGTTTGCTGACCTCG |
| (SEQ ID NO: 7) | ATTGTTGGAGGAGTG |
| | CAAAAG |
| | (SEQ ID NO: 101) |
| 3300019093\|Ga0187843_10013171_2\|M | GGTTTGCTGACCTCG |
| (SEQ ID NO: 8) | ATTGTTGGAGGAGTG |
| | CAAAAG |
| | (SEQ ID NO: 101) |
| 3300023179\|Ga0214923_10008431_2\|P | TTGCCTCCTGTGGGG |
| (SEQ ID NO: 9) | TTGTATGTGAAG |
| | (SEQ ID NO: 105) |
| 3300027730\|Ga0247833_1032983_1\|M | GGTTTGCTGACCTCG |
| (SEQ ID NO: 10) | ATTGTTGGAGGTGTG |
| | CAAAAG |
| | (SEQ ID NO: 106) |
| 3300028114\|Ga0247835_1021903_1lP | GGTTTGCTGACCTCG |
| (SEQ ID NO: 11) | ATTGTTGGAGGTGTG |
| | CAAAAG |
| | (SEQ ID NO: 106) |
| 3300028553\|Ga0247839_1034275_1\|M | GGTTTGCTGACCTCG |
| (SEQ ID NO: 10) | ATTGTTGGAGGTGTG |
| | CAAAAG |
| | (SEQ ID NO: 106) |
| 3300028569\|Ga0247843_1031164_2\|P | GGTTTGCTGACCTCG |
| (SEQ ID NO: 11) | ATTGTTGGAGGTGTG |
| | CAAAAG |
| | (SEQ ID NO: 106) |
| 3300014164\|Ga0181532_10001487_14\|M | GTGAGAACCGCTGCG |
| (SEQ ID NO: 12) | GTTCGCGGGGATGGT |
| | TTCAAAG |
| | (SEQ ID NO: 107) |
| 3300014164\|Ga0181532_10001487_14\|P | GTGAGAACCGCTGCG |
| (SEQ ID NO: 13) | GTTCGCGGGGATGGT |
| | TTCAAAG |
| | (SEQ ID NO: 107) |
| 3300014165\|Ga0181523_10000360_35\|M | GTGAGAACCGCTGCG |
| (SEQ ID NO: 12) | GTTCGCGGGGATGGT |
| | TTCAAAG |
| | (SEQ ID NO: 107) |
| 3300014165\|Ga0181523_10000360_33\|P | GTGAGAACCGCTGCG |
| (SEQ ID NO: 13) | GTTCGCGGGGATGGT |
| | TTCAAAG |
| | (SEQ ID NO: 107) |
| 3300014200\|Ga0181526_10000193_31\|M | GTGAGAACCGCTGCG |
| (SEQ ID NO: 12) | GTTCGCGGGGATGGT |
| | TTCAAAG |
| | (SEQ ID NO: 107) |
| 3300014200\|Ga0181526_10000193_30\|P | GTGAGAACCGCTGCG |
| (SEQ ID NO: 13) | GTTCGCGGGGATGGT |
| | TTCAAAG |
| | (SEQ ID NO: 107) |
| 3300027720\|Ga0209617_10001817_3\|M | GGTTTGCTGACCTCG |
| (SEQ ID NO: 14) | ATTGTTGGAGGAGTG |
| | CAAAAG |
| | (SEQ ID NO: 101) |
| 3300009764\|Ga0116134_1001531_13\|P | TTCGGAATCGCTGAC |
| (SEQ ID NO: 15) | GCTCGCGGGGCTGGT |
| | TTCAAAG |
| | (SEQ ID NO: 108) |
| 3300018009\|Ga0187884_10009678_2\|M | TTCGGAATCGCTGAC |
| (SEQ ID NO: 15) | GCTCGCGGGGCTGGT |
| | TTCAAAG |
| | (SEQ ID NO: 108) |
| 3300018014\|Ga0187860_1004616_12\|M | TTCGGAATCGCTGAC |
| (SEQ ID NO: 15) | GCTCGCGGGGCTGGT |
| | TTCAAAG |
| | (SEQ ID NO: 108) |
| 3300018016\|Ga0187880_1008327_2\|M | TTCGGAATCGCTGAC |
| (SEQ ID NO: 15) | GCTCGCGGGGCTGGT |
| | TTCAAAG |
| | (SEQ ID NO: 108) |
| 3300018017\|Ga0187872_10010132_5\|M | TTCGGAATCGCTGAC |
| (SEQ ID NO: 15) | GCTCGCGGGGCTGGT |
| | TTCAAAG |
| | (SEQ ID NO: 108) |
| 3300018022\|Ga0187864_10004559_12\|P | TTCGGAATCGCTGAC |
| (SEQ ID NO: 15) | GCTCGCGGGGCTGGT |
| | TTCAAAG |
| | (SEQ ID NO: 108) |
| 3300018040\|Ga0187862_10006434_12\|P | TTCGGAATCGCTGAC |
| (SEQ ID NO: 15) | GCTCGCGGGGCTGGT |
| | TTCAAAG |
| | (SEQ ID NO: 108) |
| OCZT010053476_2\|M (SEQ ID NO: 16) | GTTTGCATGATGACG |
| | TTTGCGGGGTTGGTT |
| | TGAAAG |
| | (SEQ ID NO: 109) |
| 3300014839\|Ga0182027_10014967_5\|M | CTCTGACGCGCTGAC |
| (SEQ ID NO: 17) | GTTCGCGGGGTTGGT |
| | TTCAAAG |
| | (SEQ ID NO: 110) |

TABLE 4
Direct Repeat Homology-containing
Regions of Representative
CLUST.121143 Systems

| Effector accession | Homologous Region |
|---|---|
| 3300018040\|Ga0187862_ | CCGCGAG |
| 10006434_12\|P | (SEQ ID NO: 200) |

TABLE 5
Direct Repeat Homology-containing Loci Sequences
of Representative CLUST.121143 Systems

>3300018040|Ga0187862_10006434_12|P
TGTTCCGTTCCGAACGAGGCAAAAAGACTGACGACGCAGGC
GAAGAAGGTGAGGCAAAGCGTGGTAAATACAAAGACGACTG
GCAGACTTGGTATCGCCAAAAGTTGGAAAAGGTCTGGTGCA
AGTAATCTGACATCGCCCATTCGAGACCCGCGAGCATGACA
TGGAGACCGACGATTTCCTTCCTATCTACTCGCTCGCGGAG
TGGCATTATTGCCCGCGCTCGTCTTTTCTGTCGTGGTTTGG
TGCAGAGCGTGAGGATCGCGTCACCCCGGCTTACCAGAAAA
TGCGCGAAGTCCACGCGGTG
(SEQ ID NO: 201)

TABLE 6
Non-coding Sequences of Representative CLUST.121143 Systems

>3300028569|Ga0247843_1031164_2|P
CACAATATTTCTTAAATGTCGAGAAAATAATATTTTACACCTATCCATATGCCAAATTACAAAAATGAATGTTTTACCTCATAA
AGAGTAAAAAGTGCTCCCCCGTCACAAAACATTAGTTTGGTGACTGGTTGTTTTTAACCACCAACTTCTCTGTCCAATTTATTG
GGGTTTTGTGAATCCCTATTCCAAGGACCGTTTTTGTACTACCCCCTAATTTACAGTTATCCTTATTATGAACTGGAATAGCTC
CCTTAAAAGTCCGATTATAACTGCTTGCTTAATACGATGAATCACAAAAATACCGTTAAAGCTCCTGTTCGCGAACTTACCCGG
CATGCATTGCAGAAACCCGGGGAGGAGAGTGAACCGGGAGAAACAACAAAGACTCTTAAGTTCCGTGTGGATGCCAAGGGACAT
ACCCGAACCCGACTCGACCAGGCAGCACTGAACATTGCTCGGAAAAGCATCTGGGTCAGTTCCCTTCCACCCCGTCAGGCAAAG
CAATCGGAAGGTGAAGACCGGCGTTCCACCGAGGAACCATGGCGCGTTTGGTACAAGAAGCAGATCATGGGAAAGTGGTCTTAA
AAAATCCCTTGCCACCCGGCTATCATAGGATCAAATTAACCCCTTAGTATTTTCTTTGCACAACGTCGACTGCCCTGCCAAGGA
GCGGCTGATAACCAACAAGTTCTTTTACATTTGAGGTGCAAACCGTTCTTGTGATTTTTTTATAAAAGGATGCACCCGAAAGGG
TTGGCTATACCCACATACTGCCCGCTTGCATTATGT (SEQ ID NO: 202)
>3300013006|Ga0164294_10029128_3|M
GTCTACTTTCACGGCAACGTGAAAGACTTGGAACCCAAACCCGGTTCGGTCACACCGATCCAGAAAACGGCCGCGGGGCTGATG
TTTCTTGTCGATGCGATCATGCTGGGACTCGCTCTTTATTTGATCCTTCGCTAACGCGAACCGATCGATAAGGATTAAGTCGCA
CTACCCCTGCATCGATTCCCGTTTTTTCGATTCCCTTCCAGGTATTTAATTTTTACTTCTCAACGAGGTATTTGGCTTGGCATA
GTCTCCTCTGCGCCCCCTGCCCCCTGTCCCCTGCCCCCTTTCACTTCCAGCCTACCAATTCCCAGTGTTCAAAACGTCGGTGTT
TTGGCGTTTATCCTTTCCTGAGATAACGCCCAGGACTGTTTTTGTCCCACCTCCTAATTTACACTTATCCTTATTATGAACTGG
AATAGCTCCGTTAAAAGTCCGATTATGACTGCTTGCTTAATACGATGAATCACAAAAGCACTGTCAAAGCCTCTGTTCGCCATC
TTACTCGGCATGCATTGCAGAAACCCGGGGAGGAGAGTGATCCGGGAGAAACGACAAAGACTTTAAAGTTCCGGGTAGATGCCA
AAGGACATACCCGAACCCGACTCGACCAGGCAGCACTGAACATTGCCCGCAAAAGCATCTGGGTCAGCTCCCTTCCACCCCGTC
AGGCAAAGCAATCGGAAGGTGAAGACCGGCGTTCCACCGAGGAACCATGGCGCGTTTGGTACAAAAAGCAGATCATGGAAAAGT
GGTCTTAAAAAATCCCTTGCCACCCGGCTATCATAGGATCATTTTAGTCTCTTAGTATTTTCTTTGCACAACGTCGACTGCCCT
GCCAAGGAGCGGCTGACAACCAACAAGTTCTTTTACATTTGAGGTGCAAACCGTTCTTGTGATTTTTTTACAAAAGGATGCACC
CGAAAGGGTTGGCCATACCC (SEQ ID NO: 203)
>3300018868|Ga0187844_10013314_2|M
ACGGCAACGTGAAAGACTTGGAACCCAAACCCGGTTCGGTCACACCGATCCAGAAAACGGCCGCGGGGCTGATGTTTCTTGTCG
ATGCGATCATGCTGGGACTCGCTCTTTATTTGATCCTTCGCTAACGCGAACCGATCGATAAGGATTAAGTCGCACTACCCCTGC
ATCGATTCCCGTTTTTTCGATTCCCTTCCAGGTATTTAATTTTTACTTCTCAACGAGGTATTTGGCTTGGCATGGTCTTCTCTG
CGCCCCCTGCCCCCTGTCCCCTGCCCCCTTTCACTTCCAGCCTACCAATTCCCAGTGTTCAAAACGTCGGTGTTTTGGCGTTTA
TCCTTTCCTGAGATAACGCCCAGGACTGTTTTTGTCCCACCTCCTAATTTACACTTATCCTTATTATGAACTGGAATAGCTCCG
TTAAAAGTCCGATTATGACTGCTTGCTTAATACGATGAATCACAAAAGCACTGTCAAAGCCTCTGTTCGCCATCTTACTCGGCA
TGCATTGCAGAAACCCGGGGAGGAGAGTGATCCGGGAGAAACGACAAAGACTTTAAAGTTCCGGGTAGATGCCAAAGGACATAC
CCGAACCCGACTCGACCAGGCAGCACTGAACATTGCCCGCAAAAGCATCTGGGTCAGCTCCCTTCCACCCCGTCAGGCAAAGCA
ATCGGAAGGTGAAGACCGGCGTTCCACCGAGGAACCATGGCGCGTTTGGTACAAAAAGCAGATCATGGAAAAGTGGTCTTAAAA
AATCCCTTGCCACCCGGCTATCATAGGATCATTTTAGTCTCTTAGTATTTTCTTTGCACAACGTCGACTGCCCTGCCAAGGAGC
GGCTGACAACCAACAAGTTCTTTTACATTTGAGGTGCAAACCGTTCTTGTGATTTTTTTACAAAAGGATGCACCCGAAAGGGTT
GGCCATACCC (SEQ ID NO: 204)
>3300023179|Ga0214923_10008431_2|P
TCAAAACCAGCCGTAGCTGGCGGAAAATATGCTTGGGATTGTCATTGGTATGTGGCCAATTCCTTTCCCACACGGCGTGCTTGT
CCACAGGATTTTAACCCTGCCTGTTTTTTTGATATCAAACCTGATATCGGTCATTTCTCCTCGATACTCTGAAACCAATCAGAA
ACACCCTTCCCAGGATGCTGAGTTAAGAACCACACGCTAACTTATCGTTTGGCTGAAAGGGATTTGAACCCTTTTCTTATTATA
TTGCTGAATACAGAGAAATTCTAAGAAATCTTAAAATATATTTTACCTGCAAACAGCACAAAGCACTAATAGCCAGTTATATGC
ACACCTAGTAGGATTGAATCTTATTAATACAACCTAGGACAGCAAATGACCCACCATATGAGTTATTATTGTGGAATGAAGAAT
TACCAAACTTGTGGAAAGTCGATATCTGGGGATACGATCAATGCTTAATCCAGCTGAAATGCAAATGCCCTCAAATAGTATAAA
ATCGATCAAAACTTCAGTACGAGAGCTGTACAACCACGCCTTGAACAAACAGGGCGATGGTGAGCCAGGAGAGACAACCAAGAC
ACTTAAGTTCAAGATCGATCCACAAGCGGCGCTGAACATTGCCAGGAAGACGATCTGGGTCAGTACCCTACCTCCTAAAAAAGC
CAAGAGCGGTGATCAGGACTTTCGTGGTGTAGGACAAGAGCTGTGGGCGAAATGGTACAAGGATAGGGTTCACAAAAACTGGGC
ATAAAATAGCACTTGTCTGAATTGGGATGGGTTAATACATTGAAATCTTAGTATTTACTTTGCATAGCGTTGCCAACCTTGCCC
AAGGATGAGTCAACGCCCCATAGAAGGCAGTTCATTAACACGCAAAAGGCACACCGCCGTAGTAAGTAGGGGGCAGCAACCACA
GATGGTGAGATGCCTCCTATGGGGTCATATGTGAAGTTCATGTTGTCTCCCATCTTGGACCCATAGCCGTTGGTGAGTTGCCTC
CTGTGGGGCCATATGTGAAGGAGGCCAATTCTGCTCGATTGTGATCCAATGTGATGGTGAGTTGCCTCCTGTGGGGTTGTATGT
GAAGGTCAATGTGGAGCGATTGCTGGGGGTATTCAGTTGGTGATTTGCCTCCTATGGGGCTATGTGTGAAGGGATGCGATCCTG
CAACATTCAAGCCTAGTCAGTTGCAAGCGTTTTCTGCAAATGATAGAGATCTGTTGGTGGTTTGCCTTCTGTGGGGCTATGTGT
GAAGGATGTCGAAGCGCCATTGCTCGGCATTGATGCGTGTGTGATCTGGTTTCTGTGGAGTTATGTGTGAAGGCTCGCTCTCAT
AGTTCTTTGGCTTGGCACTCATAGCACTTTTCCGTTTAAACCAGCAAAAAATCGCCGCACTAGATAATGCAACATAATTTGTAT
AAATTATCCAAATAAATGCCTGTTTTCTCAACACAAGAAAAACAGCCTATCCTTTCATACTTATCTGTTTCTCTCTGTGCATCA
ATTAAATATATAATAGGATCTTAATCGTATAATAGCTTAATCCAGAGTAACCTCCTATTAGAAATCCGCTGCTCTAGTCCCCTG
AGCTACGGGCGCAGCACGTAGTTTTGTAGCAGAAAATTGTCAGAGAGGCAGGGATTATGGTGGAGTAAGAAGGGGGTTAAGGGA
TGATGGGATTAAGGGGAAATCTGAAAAAGGGGTTAAGGGATTCAGGGGTTAAGGAATTAAGGAAGAGACAAATCGATGACTGAC
AAGACGTTTAAGGTTTTTTAGGACGGAGGAGGAGGCCGAGGTCGGGGAGCTTGAGCAGTTTGGCGACAAGGAAGTAGGCGAGTG
ACCCGAGAAGAACGAGCGCAAAGGTTCCACCGATACGAACAGGGATGGGTTGGCCCATGGGTTGAATGAATTGGAGGCCTATAA
GTAGGGCTCCAATTAAGGTGACGCAGCAGAGAAGTATCTTTCCGACTCCTTGGAGGAAGTGAGGTTCGAAGTAGCTGCCTACGT
GCCGTTGGGAGGCCCACACCAGCTGCAGAATATTCAGCGTCGCCACAGAGGCTGTGGTGAGAGTGAGTCCTAAAATGCCGAGGT
TGTAGACCCGAATAAGAATGTAGTTGAAGGTGAGGTTGAGAAAAATTCCCGTAAGGCTAACGCGAAGCGGAATCCCCGGGCGAT
CGATAGCCGAGAAGGCGGGGGCG (SEQ ID NO: 205)
>3300028553|Ga0247839_1034275_1|M
CCTCATAAAGAGTAAAAAGTGCTCCCCCGTCACAAAACATTAGTTTGGTGACTGGTTGTTTTTAACCACCAACTTCTCTGTCCA
ATTTATTGGGGTTTTGTGAATCCCTATTCCAAGGACCGTTTTTGTACTACCCCCTAATTTACAGTTATCCTTATTATGAACTGG
AATAGCTCCCTTAAAAGTCCGATTATAACTGCTTGCTTAATACGATGAATCACAAAAATACCGTTAGAGCTTCTGTTCGCGAAC
TTACCCGGCATGCATTGCAGAAACCCGGGGAGGAGAGTGAACCGGGAGAAACAACAAAGACTCTTAAGTTCCGTGTGGATGCCA
AGGGACATACCCGAACCCGACTCGACCAGGCAGCACTGAACATTGCTCGGAAAAGCATCTGGGTCAGTTCCCTTCCACCCCGTC
AGGCAAAGCAATCGGAAGGTGAAGACCGGCGTTCCACCGAGGAACCATGGCGCGTTTGGTACAAGAAGCAGATCATGGGAAAGT
GGTCTTAAAAAATCCCTTGCCACCCGGCTATCATAGGATCAAATTAACCCCTTAGTATTTTCTTTGCACAACGTCGACTGCCCT
GCCAAGGAGCGGCTGATAACCAACAAGTTCTTTTACATTTGAGGTGCAAACCGTTCTTGTGATTTTTTTATAAAAGGATGCACC
CGAAAGGGTTGGCTATACCCAAGGATTCCCAGCCACCCATCTGACGGACTGGTTTGCTGACCTCG (SEQ ID NO: 206)
>3300014839|Ga0182027_10014967_5|M
TGCCGGGCGGCGGGGAAAGCGTATGATTTGCGCCGTCACCAGAAAACAAACGAAGGCACAAAATGGGGCGGAAAAGAAAAGGCA
TCGGGCAGAAAGAGCAAGCCCAGCCGGATTTGGGTCCGGCCGGGCTTGTCCAAGAAACGCTTTTGAACAGGTGTATCCGCATGG
AGGATAAGTCCATATTCAGCTTCCCTTGCTTGACCACTTTACTTTACAACACTTCGAATTTATGAGCAAAGAATACCGACCGGA
TTCGATTCACGCCTCGCTTCGCCATCTGCTTGAACTTGGCTTGAGCAAAACCGGTTCGAGTGAACCGCAAAAGATCACGCGCAC
AGTTAAGTTCAAGGTACACACGCTTGCCCGACCGGAACTGGTGCAAGGCGCATTGAACATCGCCCGCAAGTTCCTTTTCGCCTT
GGGACGCGGGAAGAAATCCGGCGAGATGACCGAAGCGGAGCGGCGCAAAGTCAGGGGCGAGTGGGAAAAATGGTATAAGGAAAA
ACTCGGAACCGTTTGGAGAAAGTGATAAGTCTGGATTTTCGCCCATTGCGGGCCTGATATGGAAAACGATGATTTTCTGCCCAT
CTACTCGCTGGCGGAATGGCATTATTGCCCGCGCTCGGCGTTTCTCTCCTGGTTCGGCGCTGAACGCGAAGACCGCGTGACGCC
GGCTTACCAGAAGATGCGTGAAGTCCATGCCGTGAGCAACCATGTGGCCTTCCGCGGCGAACTCGAACGGGGCGGTTGGCTGGG
CGGAAAAAACGCGCTGCTCATTTACCCGCTTCACGATGACGACCTTGAAAATGTGGAGCGGTTCGGGGCGGTGCGCGTCTGGCA
GGCCACATTTGAACTTCTTTAAGAAAACGCTTGCGTCTGTCCTGCTAATGGCGTAAAAAGGCCCCGTTAGTATTTACTTTGATA
CGATCTGGCGTGCCTTTCCGCCCAACGGATTCGACACGACCCACGAACTTCAGCGTGTCTGAGGAAACCTCAAGCGGTGGATGA
GCCGCTGCTTGTCGCGATCCTTGATAAGTCAAACGGAGCGAGTCGGTTAGGTTTGGAAAAAGCCTTGAACCGTTCTCAGCGGTT
TCCTATGCGTAACTTGCCTAAAATCAACACGAGTTTGCGCGTTAGCCGCTGCGACAGCAGCGGCTCACGCGCAAACTCGTGTGA
TCCAAGGGCCGAAGA (SEQ ID NO: 207)
>3300018040|Ga0187862_10006434_12|P
GCGCATCGCCGAGTTCGGCTTCTTGGGCGTGCGCGTCATGACCTGAATGCACACCCCGCGTCGAAACGGCGAGCCTTCCAAGGC
TGGCGACTTGGACTTGTATTTAACTTTGCGTCGGCCCTGGCGGACCAGTTGATTGATAGTCGGCATTGCGTCTTAAAAATGGAA
CGGGGAATATAACAAACCAAATCCGGCTTGCAACAACTATTTCGCCCGATTTGCGGTCTTAACTCATCGTAGCGGCGGTCGGCA
GACCGCCGCATTTCTTCTGGAAATTGCGCTGTCCGGCACTTTGCCGGGAGCCGCTGCGCCCGTTTTGCAGAAGTCTCGTTTTAA
TCCTTTTGGAAAGCACCGCGAAGCCAGCTTCAACTACCGCTTGCCGCCGCCGGGACACGGGCGTAGCATCACTCCACAATCAGC
CATCAGGAAAATGGGTATGAAAATCTCTTTGGGGATTTCATCATGAAAGCAAAGTATCGGTCTAACTCAATTCATGCCTCGCTC
CGGCAGCTTTTGGAGCTTGGCTTAAGCAAGAGCAGTTCGGCAGAACCACAGAAAATCACGCGCACTGCCAAGTTCAAGATTAAT
ACCGACATCCGGCCGGATTTGGTTTTAAACATTGCCCGAAAGTTTTTGTTCCGTTCCGAACGAGGCAAAAAGACTGACGACGCA
GGCGAAGAAGGTGAGGCAAAGCGTGGTAAATACAAAGACGACTGGCAGACTTGGTATCGCCAAAAGTTGGAAAAGGTCTGGTGC
AAGTAATCTGACATCGCCCATTCGGGACCCGCGAGCATGACATGGAGACTGACGATTTCCTTCCTATCTACTCGCTCGCGGAGT
GGCATTATTGCCCGCGCTCGTCTTTTCTGTCGTGGTTTGGTGCAGAGCGTGAGGATCGCGTCACCCCGGCTTACCAGAAAATGC
GCGAAGTCCACGCGGTGAGCAAT (SEQ ID NO: 208)
>3300027720|Ga0209617_10001817_3|M
AAACCCAACGGCATAAAGAGGATCAGGAGTTTTGGGTGCCCTTATTATGAGATAAAGAATAAGAATACCCCATACGATATTCAT
CCATTTAAGCAGACGTTGCACTTGGGATATTCTGTCACCTGCGTTGACCATTTGGCAACGTGCCATTATCGATGACAAGGGAGA
GGTATACCCCCAAATGGATATGCCTGTTATAAAACATTAGTTTGGTGACTTGGCATTTTTAGCCACTTTTTCCCTGTCCAATTT
TAGGGGGTTTTGTGAATCCCTATTCCAAGGACTGTTTTTGTCCCACCTCCTAATTTACAGTTATCCTTATTATGAACTGGAATA
GCTCCGTTAAAGGTCCGATTATGACTTCTTGCTTAATACGATGAATCACAAAAGCACCGTCAAGGCTTCTGTTCGCCATCTTAC
CCGGCATGCATTGCAGAAACCCGGGGAGGAGAGTGATCCGGGAGAAACGACAAAGACTTTAAAGTTCCGGGTAGATGCCAAAGC
ACATACCCGAACCCGACTCGACCAGGCAGCACTGAACATTGCCCGCAAAAGCATCTGGGTCAGCTCCCTTCCACCCCGTCAGGC
AAAGCAATCGGAAGGTGAAGACCGGCGTTCCACCGAGGAACCATGGCGCGTTTGGTACAAAAAGCAGATCATGGAAAAGTGGTC
TTAAAAAATCCCTTGCCACCCGGCTATCATAGGATCATTTTAGTCTCTTAGTATTTTCTTTGCACAACGTCGACTGCCCTGCCA
AGGAGCGGCTGACAACCAACAAGTTCTTTTACATTTGAGGTGCAAACCGTTCTTGTGATTTTTTTACAAAAGGATGCACCCGAA
AGGGTTGGCCATACCC (SEQ ID NO: 209)
>OCZT010053476_2|M
CTGAAATTCCCGGCCATCAATCCCGCCAACGCCGCCGAGCGCGATGAATTTCGTCTGAATACCTTCCCACCGGACAACCACACC
GCGCCCGCGCCGCCGACTCCGCCCGCGACACCGAAGCCGTAAAATCAAATTTGGAAAACGCAAAGCGGCCTTTGGGAATGGAGG
CCGCTTTTTGTTTTGGATTGTTCCTGTTCACGAAATCCGCTATTCAGGCTACAAATCTAAAAGGGTAAATATGAGCAAAGAGCC
TCGGAAAAATTCGACTCACGCCTCGCTTCGCCAGTTGCTTGAACTTGGTTTGAGCAAAAGCAGTTCGGCAGAGCCACAGAAGAT
CACGCGCACGGTGAAGTTCAAGATTCACACGCTTGCACGACCGGAACTCGTTGGCGCGTTGAACATCGCCCGCAAATTCCTGTT
CGCCTCGGGACGCGGAAAAAAGTCCGGTGAAATGACCGAAGCCGAGCGGCGCAAAGTGCGGGGCGAGTGGGAAAAGTGGTATAA
GGAAAAACTTGCGACCGTCTGGAAAAAACAATGAAAGGCTTGCGTCAGTTCTGCGAAAGGCGTAAACAGGCGGCGTTAGTATTT
ACTTTGATACGATCTAGCGTGCCTTTCCGTCCAACGGATTCGACACGACCCGTGAACTTCAGCGTGCAAAAGGAAATCACAAGT
GGTGGTTGACCGCTGCCTGTAGCGATCCTTGAAAACTTAAACCGAGCGAATCAGTTAGGTTCGGAAAGAAGCCCGAACTGGTTT
CAAAGTCAATCGCGTCAATGATTTCCTGCAAACCATAAACGGGTCTAAACGGGTCAGTCCTAACTTT
(SEQ ID NO: 210)
>3300014720|Ga0172376_10007396_6|M
TGCCCCAGCCCCTAACTCAAGTTCTGTAAAAACATTATTCGAAAGAATAAATCCCCGATCAGAGGATTGCCCAACAATAGTGCC
TTGGTTGTTTATATCGTAACAGGCGCTCCACGTATGGGCGGAACTAAGCACCCCCACGGAACTCATGCTTTTATTTCTGTACAC
GAACCCCCTGTCACCAAGCGAACTTGAGGAGGCACCAACCACAACACCCGAGTCGTTAATGCTGTAGCTTCGACTGGAATTATT
CGTGTAGGTGTACTCGCCTCCGAACCACGATGTCCAAGTAACAACCTGAGGACCAAGAGTCCTAAGATTTACCAGCTTGTAAGT
CGGGGCTTGCGCATTTCCGTTTTCGCAAATTACGAGCGAAGCAATTAAAACGCAGAGCCACCGAACCATATGATTATTCAACAC
CTATTTTACTTTTTTTCAACTAGGGAAAACCGGCTTTTTAACTACTATCCCTTTTGTCCTAAGCATTAACTTTTGCCTCAGAAA
CTGTCCTGATCACTAAACTAATGGTTTGTGACCGGCTGTGTTTTGGGCGTTCCGACTCTGTGGGTTTCATTGGGGTTTTGTGAC
TGCCCCCTCCTAATACCGTATTTGTACCACCCCCTACCTTAGGGTTGGCCCTGTTTTGAACTGGAATACGTACCTTAATCGTCT
GATTATAACCCTTCGGTTAAAACGATGATTCATAAGAGTACCGTTAAAGCATCGGTTCGCCACCTGACCCGCCATGCGTTGGAC
AAACCCGGCGAGGGCGACCCGGGTGAAACAACAAAAACCCTAAAGTTCCGGATTGATGCCAAAGATCACACCCGCACCCGGCTC
GACCAGCAGGCAGCCCTAAACATTGCCCGAAAAAGCATCTGGGTCAGTTCCTTGCCGCACCGGCAGGCAAAACAGTCGGAGGGA
GAAGACCGGCGTTCCACTGAGGAGCCGTGGCGGGAGTGGTACAAGAAGCGGATCTGGGAGAAGTGGGCTTAAAAAAAAGCCCTT
GCCACCCGGTCCCCGCAGGATCATTTTAGTCTCTTAGTATTTTCTTTGCACAGCGTTGACTCCCCTGCCAAGGGTGCGGCCAAC
AATCCAACAAGTTCTTTCGCAACAGGGGGCAAACCCCGTTCAATTTTGCTTTAAGGAACTAAAGCCCATGGCGTTAGGTATAGC
T (SEQ ID NO: 211)
>3300014720|Ga0172376_10013958_4|M
AAATACGGTTCCGTCAAATAAGTTGCCTGAAGAGTCACTGGCGTTCCCTGAAAATTCGTATTTTCCAACCAAGCCATAATTGAG
GTTAACCACGGCAGACTTCGCTGTTGAACCCATCAACAAGATGGCTAATGCGACCACCCGATTCATATATTAATTAAACCATGT
TCTTTTGTTTTTTCAATGTCCCACAGGCTCTTTTTTTGACTAAATAAAATATATCCCTTTTGGTATATCCTTGGTTGGTTTCGT
ATTATCGCATAAAACAAATGGTTTGTGACCGGTCATGTTTTGAGCGTTCCATCTCTGTAGGTTTCATTGGGGTTTTGTGATTAC
CCCCTCCTAATACCGTATTTGTACCACCCCCTACCTTAGGGTTAGCCCTGTTTTGAACTGGAATACGTACCTTAATCGTCTGAT
TATAACCCTTCGGTTAAAACGATGATTCATAAGAGTACTGTTAAAGCATCCGTTCGCCACCTGACCCGCCATGCTCTGGACAAA
CCCGGCGAGGGCGATCCGGGTAAACCAACAACAAAAACCCTGAAGTTCCGGATTGATGCCAAGGGGCACACCCGCACCCGGCTC
GACCAAGCCGCTTTAAATATAGCTCGCAAGAGTATCTGGCTGAGTACTTTGCCCAAAAGATCCAAAAAGGAAACACTGGCTGAA
GCACGTGGGTCCACAAAACCAGCGTGGAAAAAGTGGTATCAAAATCGTATCAGCGAGAATTGGTGTTAAAAATACTTGTCTTAC
ACTCGAAAATATTATAAAAAGCAGTCTTAGTATTTTCTTAGCAACACGTTGTCTGTCCTCGCCAAGGAACGGTCAACAATCCAA
CAAGTTCTTTCGCAACGGGGGGGCAAACCAGAAAATTTTCCCTTAAATTTGAATCTTAGGACTTTAGATACTGCCATGCGCGGA
TACTACAAAACCAAATGCATATTTTTCGTA (SEQ ID NO: 212)
>3300013087|Ga0163212_1009539_3|M
GGCAGGGTCAAAGTCATCATGGCTTGGAAGTTGGACAGAATCGGCCGCTCGACCCAGCACTTGGCCGGAATCATCAATCGACTC
CTTAAGGCGGATGTTGGCCTCGTGGTTCCCTCTCAGGGTATTGATACCTCGGCCGGCAGCATGAATCCTGCCAGTAAGCTCCAG
TTGAACGTTCTGGCCGCAGTCGCTGAGTTTGAGAGGGACCTTATCCGCGAGAGGACGAAGGCCGGCATGAAGGCAGCTAAGGCC
AGAGGCGTTAAATTCGGCCGTGAAACGGTGGTAACCGAAGCCCAGCGAATCCTAGCCAAAGAGATTCTTCAGCTTAATCCGGAT
ACTTCGGTGACCAGCCTGTCAAAGCGGTTGGGCTTGTCTTTGGGAACGGCGAGCAGACTTAAGACGATTTTGGGAGGTAGCTGC
TAGTACCGCCAATGTCCTATCCACCCGCTTACGATTGACCCAGTTTTGAACTGGAATACGCACCTTAATCGTCTGATTATAACC
CTTCGGTTAACACGATGATTCATAAGAGTACCGTTAAAGCATCGGTTCGCCACCTGACCCGCCATGCTCTGGACAAACCCGGCG
AGGGCGATCCGGGTGAAACAACAAAAACCCTGAAGTTCCGCATTGATGCCAAAGGTCACACCCGCACCCGGCTCGATCAGCAGG
CCGCCCTGAACATCGCTCGTAAAAGCATCTGGGTCAGATCATTGCCGCCCCGACAGGCAAAGCAGTCGGAGGGCGAGGATCGGC
GTTCCACTGAGGAGCCATGGAGGGAGTGGTATAAGAAGCAGATCCGGGAGAAGTGGGCTTAAAAAAACCCTTGCCACCCGGTCC
CCCTAGGATCATCTTGGTCCCTTAGTATTTTCTTTGTACAGCGTTGACTCCCCTGCCAAGGGTGCGGCCAACAACCAACAAGTT
TTTTCTCAACGAGGGGTGTTATAACCCTGAAATTTCGACAGGGTGCTGAACTGTAGGGTTTTGGCGATAAC
(SEQ ID NO: 213)
>3300014200|Ga0181526_10000193_31|M
CACCACGCCGTCTTCGATGGCATTGAACAACGTCTCCAGAAACTTCCGTTCCCGGGCCAATCGTTGGACAACCGTTTGCAACCC
TTCGGCATCCAGGCGTCCGATCCTGCCCAGGACTTTATCGAGAAAAGTCGATATTACCGCAGCCATAATGATGATACCCGCCAA
TGCGCAACCACCGCGCCAATTTGACGCACCCAAAGTATTCAAGCAATTCTGATTAGGCAAGCATTGCTTTCAATTTGAAAGGCC
GGAAAAAACCGTGAAAAATTCGGGGTTTTTCAATTAAACAAGAAAGTTGTCAAGGGGAAAATTGCGCAAAAAAAACAGTCAAAA
TTTCGGCATTTTTGACCTAAGCAATTGCAAACCAAACACTTACGAATTTCCACCTGCTTGCTGCCCATGACTGCAAAATGGTAG
CTTGGGACTGATGGACGAATGCGACTGATGGTCTGGCAACCAGCCAGTGGTCAAGGCGGGTTTCTGCCAGATGGACAGATAGGA
TTGTAATCATAAGACGATTCGGGCAAAACCAGGGCGGACAGGGAAAGCAGGAATTGGACGGTGGGGCGAGATTCCATCGAGCCG
TAAAATCGAGTCGGAGCACAGCCCGTCACGTTGCAGGATTAATGGTGAAAATGGGTCTTGGCAGGACGTTCTGTTTGGGCCATA
ATCTTGCCCGCTCCACAAAACGAAGGGAAAAAGAAGATGAGTGCGGAAACTTCAGAGGCTGGCAAAACCATGTGGGCTTTCGAC
TTGGGCACAGACTGCGAATTGCGCGTCGAATGCCGCAAACCATCGAATTGAAACTATTTATGGATTCAATCCACAAATCCGTTC
GTTCGCTGCTATCGCTTGGCCTGTCGCGTAGCGCTTCGGCAAGTCCGCAAACAATTACGCGCACAGTAAAATTCAAGATCAATA
CCGACATTCGGCAAGCCGCGCTCAATATCGCCAGAAAGCATCTGTTTCGCATTGGCCGCGAAAAAAAATCAGATGAGGAGAATG
AAGCCGCACGACGCAAAGTTATGGGTGAGTGGGAAACTTGGTATCGGCAGAAACTCGCCAGCGTTTGGAATAAATAATTCACCC
TTAGCCATTTTGACTGTGAGCGAGATATGGAGATCGACGATTTCCTTCCAATCTATTCGCTCGCGGAGTGGCATTATTGCCCAC
GCTCGTCTTTTCTGTCGTGGTTCGGCGCGGAACGTGAGGATCGCGTCACCCCGGCTTACCAGAAGATGCGTGAAGTCCATGCCG
TGAGCAATCATGTGGCGTTTCGGGGCGCATTGGAACGCGGCGGCTGGCTGGATGGCAAACACGCGCTGCTGGTTTATCCCTTGC
ATGATGACGACCTTGAAAATGTGGAACGTTACGGCGCGGTACGGGTGTGGCAGGCAACGTTTGAATTTCTTTGAATTTAGGCTT
GCAGTTGGATGGGAGCAGGCATAATACTTCTCCCGTTAGCTGTCTCCTCGGAGGCAGATTTACTTTGATTCTGTGCGCCTTTAC
GCCCCACGTATTTGACGCACTTCGCGAACTTCAGCGGTTAACGGAAACCGCCAGCGGTGGATGGACGATTCACCCGGCGTTCCT
TGACAACACAGTCCGTAGCAGTTGGTTATATACGAAACGGACTAAAAGCGGTTTGCCATGCGTAACTTGTTGCCAGACAATGGA
GTCATCATCTCGGCAGAAATTTTGCATTTAGGTCTTGATGCAAATATTTGGACGGCAGGGCGTGAAGACAGATCAGCATCGCGC
TTGGCCAGGCCC (SEQ ID NO: 214)
>3300019093|Ga0187843_10013171_2|M
CTCTCTGGATTGGGTTGGTCTTCGCCACGATGGTCTACTTTCACGGCAACGTGAAAGACTTGGAACCCAAACCCGGTTCGGTCA
CACCGATCCAGAAAACGGCCGCGGGGCTGATGTTTCTTGTCGATGCGATCATGCTGGGACTCGCTCTTTATTTGATCCTTCGCT
AACGCGAACCGATCGATAAGGATTAAGTCGCACTACCCCTGCATCGATTCCCGTTTTTTCGATTCCCTTCCAGGTATTTAATTT
TTACTTCTCAACGAGGTATTTGGCTTGGCATGGTCTTCTCTGCGCCCCCTGCCCCCTGTCCCCTGCCCCCTTTCACTTCCAGCC
TACCAATTCCCAGTGTTCAAAACGTCGGTGTTTTGGCGTTTATCCTTTCCTGAGATAACGCCCAGGACTGTTTTTGTCCCACCT
CCTAATTTACACTTATCCTTATTATGAACTGGAATAGCTCCGTTAAAAGTCCGATTATGACTGCTTGCTTAATACGATGAATCA
CAAAAGCACTGTCAAAGCCTCTGTTCGCCATCTTACTCGGCATGCATTGCAGAAACCCGGGGAGGAGAGTGATCCGGGAGAAAC
GACAAAGACTTTAAAGTTCCGGGTAGATGCCAAAGGACATACCCGAACCCGACTCGACACCCGGGGTGGTCGGGGAACATTGAT
GGGCAACATGCACTATGAGCGAATTTTGTCTGGGTTGAGGGCAAGTTGGCCGAGGCAGGTTGCTACAAGGCACCCAGTGCCGCC
AAGTACCGCAAAGGAATCACGCCGTTCTTGCGATTTGTAAATCCAGCATATACCAGTGCCACCTGTTCAGCTTGTGGTGAGGTG
TTCAGTTCTAGTTGGTATAAGAAAACCGCAGCCACAATCAGTAAGGAATCACCCGGTTCATGGTCAGTGACGCTTCCCAACGGA
AAAAAACTTCAGTTGCCATGCTCCTACACCTCATACATGCGTGGGCGCGGTGAAAAGACATGGAACACCGCTGAACGGCTGGAG
GAACTTTTCAAGGATCGAACATGGTCAGATCTTCCCCCCAGCACCCGAAAAACAGTAGAGGGATTGGTTGCTCGCCTGACTCAT
CATCGCCCCAAACGGGGTCAGGCAGCACTGAACATTGCCCGCAAAAGCATCTGGGTCAGCTCCCTTCCACCCCGTCAGGCAAAG
CAATCGGAAGGTGAAGACCGGCGTTCCACCGAGGAACCATGGCGCGTTTGGTACAAAAAGCAGATCATGGAAAAGTGGTCTTAA
AAAATCCCTTGCCACCCGGCTATCATAGGATCATTTTAGTCTCTTAGTATTTTCTTTGCACAACGTCGACTGCCCTGCCAAGGA
GCGGCTGACAACCAACAAGTTCTTTTACATTTGAGGTGCAAACCGTTCTTGTGATTTTTTTACAAAAGGATGCACCCGAAAGGG
TTGGCCATACCC (SEQ ID NO: 215)

### Example 2—Identification of Transactivating RNA Elements

[0235] In addition to an effector protein and a crRNA, some CRISPR systems described herein can also include an additional small RNA that activates robust enzymatic activity referred to as a transactivating RNA (tracrRNA). Such tracrRNAs typically include a complementary region that hybridizes to the crRNA. The crRNA-tracrRNA hybrid forms a complex with an effector resulting in the activation of programmable enzymatic activity.

[0236] TracrRNA sequences can be identified by searching genomic sequences flanking CRISPR arrays for short sequence motifs that are homologous to the direct repeat portion of the crRNA. Search methods include exact or degenerate sequence matching for the complete direct repeat (DR) or DR subsequences. For example, a DR of length n nucleotides can be decomposed into a set of overlapping 6-10 nt kmers. These kmers can be aligned to sequences flanking a CRISPR locus, and regions of homology with 1 or more kmer alignments can be identified as DR homology regions for experimental validation as tracrRNAs. Alternatively, RNA cofold free energy can be calculated for the complete DR or DR subsequences and short kmer sequences from the genomic sequence flanking the elements of a CRISPR system. Flanking sequence elements with low minimum free energy structures can be identified as DR homology regions for experimental validation as tracrRNAs.

[0237] TracrRNA elements frequently occur within close proximity to CRISPR associated genes or a CRISPR array. As an alternative to searching for DR homology regions to identify tracrRNA elements, non-coding sequences flanking CRISPR associated proteins or the CRISPR array can be isolated by cloning or gene synthesis for direct experimental validation of tracrRNAs.

[0238] Experimental validation of tracrRNA elements can be performed using small RNA sequencing of the host organism for a CRISPR system or synthetic sequences expressed heterologously in non-native species. Alignment of small RNA sequences from the originating genomic locus can be used to identify expressed RNA products containing DR homology regions and sterotyped processing typical of complete tracrRNA elements.

[0239] Complete tracrRNA candidates identified by RNA sequencing can be validated in vitro or in vivo by expressing the crRNA and effector in combination with or without the tracrRNA candidate, and monitoring the activation of effector enzymatic activity.

[0240] In engineered constructs, the expression of tracrRNAs can be driven bypromoters including, but not limited to U6, U1, and H1 promoters for expression in mammalian cells or J23119 promoter for expression in bacteria.

[0241] In some instances, a tracrRNA can be fused with a crRNA and expressed as a single guide RNA.

### Example 3—Identification of Novel RNA Modulators of Enzymatic Activity

[0242] In addition to the effector protein and the crRNA, some CRISPR systems described herein can also include an additional small RNA to activate or modulate the effector activity, referred to herein as an RNA modulator.

[0243] RNA modulators are expected to occur within close proximity to CRISPR-associated genes or a CRISPR array. To identify and validate RNA modulators, non-coding sequences flanking CRISPR-associated proteins or the CRISPR array can be isolated by cloning or gene synthesis for direct experimental validation.

[0244] Experimental validation of RNA modulators can be performed using small RNA sequencing of the host organism for a CRISPR system or synthetic sequences expressed heterologously in non-native species. Alignment of small RNA sequences to the originating genomic locus can be used to identify expressed RNA products containing DR homology regions and sterotyped processing.

[0245] Candidate RNA modulators identified by RNA sequencing can be validated in vitro or in vivo by expressing a crRNA and an effector in combination with or without the candidate RNA modulator and monitoring alterations in effector enzymatic activity.

[0246] In engineered constructs, RNA modulators can be driven by promoters including U6, U1, and H1 promoters for expression in mammalian cells, or J23119 promoter for expression in bacteria.

[0247] In some instances, the RNA modulators can be artificially fused with either a crRNA, a tracrRNA, or both and expressed as a single RNA element.

### Example 4—Functional Validation of Engineered CLUST.121143 CRISPR-Cas Systems (FIGS. 5-8)

[0248] Having identified the minimal components of CLUST.121143 CRISPR-Cas systems, we selected one loci for functional validation, from the metagenomic source designated 3300014839.

### DNA Synthesis and Effector Library Cloning

[0249] To test the activity of an exemplary CLUST.121143 CRISPR-Cas system, we designed and synthesized systems containing the pET28a(+) vector. Briefly, E. coli codon-optimized nucleic acid sequences encoding the CLUST.121143 3300014839 effector (amino acid sequence provided in Table 2) were synthesized (Genscript) and cloned into a custom expression system derived from the pET-28a(+) (EMD-Millipore). The vector included a nucleic acid encoding CLUST.121143 3300014839 effector protein under the control of a lac promoter and an E. coli ribosome binding sequence. The vector also included an acceptor site for a CRISPR array library driven by a J23119 promoter following the open reading frame for the CLUST.121143 3300014839 effector.

[0250] We computationally designed an oligonucleotide library synthesis (OLS) pool containing “repeat-spacer-repeat” sequences, where “repeat” represents the consensus direct repeat sequence found in the CRISPR array associated with the effector, and “spacer” represents sequences tiling the pACYC184 plasmid as well as E. coli essential genes. The spacer length was determined by the mode of the spacer lengths found in the endogenous CRISPR array. The repeat-spacer-repeat sequence was appended with restriction sites enabling the bi-directional cloning of the fragment into the aforementioned CRISPR array library acceptor site, as well as unique PCR priming sites to enable specific amplification of a specific repeat-spacer-repeat library from a larger pool.

[0251] We next cloned the repeat-spacer-repeat library into the plasmid using the Golden Gate assembly method. Briefly, we first amplified each repeat-spacer-repeat from the OLS pool (Agilent Genomics) using unique PCR primers, and pre-linearized the plasmid backbone using BsaI to reduce potential background. Both DNA fragments were purified with Ampure XP (Beckman Coulter) prior to addition to Golden Gate Assembly Master Mix (New England Biolabs) and incubated per the manufacturer's instructions. We further purified and concentrated the Golden Gate reaction to enable maximum transformation efficiency in the subsequent steps of the bacterial screen.

[0252] The plasmid library containing the distinct repeat-spacer-repeat elements and Cas proteins was electroporated into E. Cloni electrocompetent E. coli (Lucigen) using a Gene Pulser Xcell® (Bio-rad) following the protocol recommended by Lucigen. The library was either co-transformed with purified pACYC184 plasmid, or directly transformed into pACYC184-containing E. Cloni electrocompetent E. coli (Lucigen), plated onto agar containing chloramphenicol (Fisher), tetracycline (Alfa Aesar), and kanamycin (Alfa Aesar) in BioAssay® dishes (Thermo Fisher), and incubated for 10-12 hours at 37° C. After estimation of approximate colony count to ensure sufficient library representation on the bacterial plate, the bacteria were harvested and plasmid DNA extracted using a QIAprep Spin Miniprep® Kit (Qiagen) to create an “output library.” By performing a PCR using custom primers containing barcodes and sites compatible with Illumina sequencing chemistry, we generated a barcoded next generation sequencing library from both the pre-transformation “input library” and the post-harvest “output library,” which were then pooled and loaded onto a Nextseq 550 (Illumina) to evaluate the effectors. At least two independent biological replicates were performed for each screen to ensure consistency.

### Bacterial Screen Sequencing Analysis

[0253] Next generation sequencing data for screen input and output libraries were demultiplexed using Illumina bcl2fastq. Reads in resulting fastq files for each sample contained the CRISPR array elements for the screening plasmid library. The direct repeat sequence of the CRISPR array was used to determine the array orientation, and the spacer sequence was mapped to the source (pACYC184 or E. Cloni) or negative control sequence (GFP) to determine the corresponding target. For each sample, the total number of reads for each unique array element (rₐ) in a given plasmid library was counted and normalized as follows: (rₐ+1)/total reads for all library array elements. The depletion score was calculated by dividing normalized output reads for a given array element by normalized input reads.

[0254] To identify specific parameters resulting in enzymatic activity and bacterial cell death, we used next generation sequencing (NGS) to quantify and compare the representation of individual CRISPR arrays (i.e., repeat-spacer-repeat) in the PCR product of the input and output plasmid libraries. We defined the array depletion ratio as the normalized output read count divided by the normalized input read count. An array was considered to be “strongly depleted” if the depletion ratio was less than 0.1 (more than 10-fold depletion). When calculating the array depletion ratio across biological replicates, we took the maximum depletion ratio value for a given CRISPR array across all experiments (i.e. a strongly depleted array must be strongly depleted in all biological replicates). We generated a matrix including array depletion ratios and the following features for each spacer target: target strand, transcript targeting, ORI targeting, target sequence motifs, flanking sequence motifs, and target secondary structure. We investigated the degree to which different features in this matrix explained target depletion for CLUST.121143 systems, thereby yielding a broad survey of functional parameters within a single screen.

[0255] FIG. 5 shows the degree of interference activity of the engineered compositions by plotting for a given target the normalized ratio of sequencing reads in the screen output versus the screen input. The results are plotted for each DR transcriptional orientation. In the functional screen for each composition, an active effector complexed with an active RNA guide will interfere with the ability of the pACYC184 to confer E. coli resistance to chloramphenicol and tetracycline, resulting in cell death and depletion of the spacer element within the pool. Comparing the results of deep sequencing the initial DNA library (screen input) versus the surviving transformed E. coli (screen output) suggest specific target sequences and DR transcriptional orientation that enable an active, programmable CRISPR system. The screen also indicates that the effector complex is only active with one orientation of the DR.

[0256] FIG. 6 shows the lack of interference activity of the negative control, where the coding region for the CLUST.121143 effector protein has been deleted from the pET-28a(+)-derived plasmid prior to electroporation into E. coli.

[0257] FIGS. 7A-B depict the location of strongly depleted targets for CLUST.121143 3300014839 effector targeting pACYC184 and E. coli E. Cloni essential genes. Notably, the location of strongly depleted targets appears dispersed throughout the potential target space.

[0258] FIG. 8 depicts a weblogo of the sequences flanking depleted target, indicating a prominent 5′ PAM of TTG.

### Example 5—Identification of Minimal Components for CLUST.196682 CRISPR-Cas System (FIGS. 9-12)

[0259] This protein family describes a large single effector associated with CRISPR systems found in Fervidibacteria, Haloarcula, Halohasta, Halorubrum, Natronoccus species and uncultured metagenomic sequences collected from freshwater, hot springs, salt lake, sediment, soil, and wastewater environments (TABLE 7). CLUST.196682 effectors include the examples of proteins detailed in TABLES 7 and 8, below. Examples of direct repeat sequences for these systems are shown in TABLE 9.
[0260] Examples of naturally occurring loci containing this effector complex are depicted in FIG. 9, indicating that for CLUST.196682 loci, the effector protein co-occurs with a CRISPR array. No other families of large proteins were identified within a bi-directional 15 kb window that co-occur with the effector protein or a CRISPR array.
[0261] The direct repeat sequences of CLUST.196682 exhibit multiple conserved motifs, including 5′-GYYYGNKRKNNAC-3′ (SEQ ID NO: 832) proximal to the 5′ end, or a central 5′-YCCRCGCGCGCGNGGG-3′ (SEQ ID NO: 833), where Y refers to C or T or U, K refers to G or T or U, R refers to A or G, and N refers to any nucleobase (FIG. 10).
[0262] FIG. 11 is a schematic representation of a phylogenetic tree of example CLUST.196682 effectors, showing that the family exhibits sequence diversity.
[0263] FIG. 12 is a schematic representation of a multiple sequence alignment of CLUST.196682 effector proteins revealing the location of the conserved catalytic residues of the RuvC domain, indicated by the colors Magenta, Blue, and Red.
[0264] Optionally, the system includes a tracrRNA that is a subset of a non-coding sequence listed in TABLE 10.

TABLE 7
Representative CLUST.196682 Effector Proteins

| | | # | | | effector |
|---|---|---|---|---|---|
| Species | effector accession | spacers | casl | cas2 | size |
| wastewater-anaerobic digestor- | 3300025638\|Ga0208198_1021643_2\|P | 2 | N | N | 481 |
| anaerobic digestor sludge | | | | | |
| (3300025638\|Ga0208198_1021643) | | | | | |
| aquatic-thermal springs-hot spring | 3300005300\|Ga0072500_136962_4\|M | 33 | N | N | 512 |
| (3300005300\|Ga0072500_136962) | | | | | |
| activated sludge metagenome | CAAACJ010042499_2\|P | 2 | N | N | 481 |
| (CAAACJ010042499) | | | | | |
| activated sludge metagenome | SRR5007116_megahit_k177_300528_2\|M | 6 | N | N | 481 |
| (SRR5007116) | | | | | |
| activated sludge metagenome | SRR5007140_megahit_k177_707372_2\|P | 7 | N | N | 481 |
| (SRR5007140) | | | | | |
| activated sludge metagenome | SRR5007457_megahit_k177_513017_2\|M | 13 | N | N | 481 |
| (SRR5007457) | | | | | |
| activated sludge metagenome | SRR5007461_megahit_k177_311051_7\|P | 4 | N | N | 419 |
| (SRR5007461) | | | | | |
| aquatic-freshwater-freshwater lake | 3300027896\|Ga0209777_10000273_30\|P | 2 | N | N | 341 |
| sediment | | | | | |
| (3300027896\|Ga0209777_10000273) | | | | | |
| aquatic-freshwater-freshwater lake | 3300027896\|Ga0209777_10000273_32\|M | 2 | N | N | 353 |
| sediment | | | | | |
| (3300027896\|Ga0209777_10000273) | | | | | |
| aquatic-freshwater-sediment | 3300013127\|Ga0172365_10030480_1\|M | 3 | N | N | 373 |
| (3300013127\|Ga0172365_10030480) | | | | | |
| aquatic-freshwater-sediment | 3300013128\|Ga0172366_10002984_1\|M | 3 | N | N | 373 |
| (3300013128\|Ga0172366_10002984) | | | | | |
| aquatic-freshwater-sediment | 3300013129\|Ga0172364_10030775_1\|P | 3 | N | N | 373 |
| (3300013129\|Ga0172364_10030775) | | | | | |
| aquatic-freshwater-sediment | 3300013130\|Ga0172363_10005240_1\|P | 3 | N | N | 373 |
| (3300013130\|Ga0172363_10005240) | | | | | |
| aquatic-freshwater-sediment | 3300013133\|Ga0172362_10039269_3\|M | 3 | N | N | 373 |
| (3300013133\|Ga0172362_10039269) | | | | | |
| aquatic-freshwater-sediment | 3300032070\|Ga0315279_10000130_51\|M | 8 | Y | N | 342 |
| (3300032070\|Ga0315279_10000130) | | | | | |
| aquatic-freshwater-sediment | 3300032118\|Ga0315277_10001250_38\|M | 2 | N | N | 368 |
| (3300032118\|Ga0315277_10001250) | | | | | |
| aquatic-marine-deep subsurface | 3300024429\|Ga0209991_10029076_1\|P | 2 | N | N | 343 |
| (3300024429\|Ga0209991_10029076) | | | | | |
| aquatic-marine-marine sediment | 3300014886\|Ga0180300_10007429_2\|M | 2 | Y | Y | 365 |
| (3300014886\|Ga0180300_10007429) | | | | | |
| aquatic-non marine saline and | SEJ25361.1 | 2 | N | N | 382 |
| alkaline-hypersaline | | | | | |
| (2140918017\|Ga0065697_1000127) | | | | | |
| aquatic-non marine saline and | 3300005935\|Ga0075125_10033396_1\|P | 5 | N | N | 432 |
| alkaline-saline lake | | | | | |
| (3300005935\|Ga0075125_10033396) | | | | | |
| aquatic-non marine saline and | 3300025736\|Ga0207997_1027507_2\|M | 2 | N | N | 432 |
| alkaline-saline lake | | | | | |
| (3300025736\|Ga0207997_1027507) | | | | | |
| aquatic-thermal springs | 3300007203\|Ga0099832_1115789_2\|M | 5 | N | N | 521 |
| (3300007203\|Ga0099832_1115789) | | | | | |
| aquatic-thermal springs-hot spring | 3300000083\|Ga0072500_119562_4\|M | 5 | N | N | 546 |
| (3300000083\|Ga0072500_119562) | | | | | |
| aquatic-thermal springs-hot spring | 3300008000\|Ga0105162_1004089_4\|M | 7 | N | N | 543 |
| (3300008000\|Ga0105162_1004089) | | | | | |
| aquatic-thermal springs-hot spring | 3300008000\|Ga0105162_1004089_4\|P | 7 | N | N | 530 |
| (3300008000\|Ga0105162_1004089) | | | | | |
| aquatic-thermal springs-hot spring | 3300022544\|Ga0212120_1002806_5\|M | 7 | N | N | 543 |
| (3300022544\|Ga0212120_1002806) | | | | | |
| aquatic-thermal springs-hot spring | 3300022544\|Ga0212120_1002806_5\|P | 7 | N | N | 530 |
| (3300022544\|Ga0212120_1002806) | | | | | |
| aquatic-thermal springs-hot spring | 3300025063\|Ga0209493_1003385_3\|M | 16 | N | N | 512 |
| (3300025063\|Ga0209493_1003385) | | | | | |
| aquatic-thermal springs-hot spring | 3300025090\|Ga0209080_1004127_5\|M | 7 | N | N | 490 |
| (3300025090\|Ga0209080_1004127) | | | | | |
| aquatic-thermal springs-hot spring | 3300025440\|Ga0209741_1005495_1\|M | 2 | N | N | 521 |
| and microbial mat streamer | | | | | |
| (3300025440\|Ga0209741_1005495) | | | | | |
| aquatic-thermal springs-sediment | 3300028675\|Ga0272445_1001731_11\|M | 6 | N | N | 516 |
| (3300028675\|Ga0272445_1001731) | | | | | |
| aquatic-thermal springs-sediment | 3300029977\|Ga0272449_1037372_1\|P | 3 | N | N | 516 |
| (3300029977\|Ga0272449_1037372) | | | | | |
| fermentation metagenome | SRR1562008_megahit_k177_216982_5\|P | 2 | N | N | 417 |
| (SRR1562008) | | | | | |
| fermentation metagenome | UOPD01011681_4\|M | 2 | N | N | 417 |
| (UOPD01011681) | | | | | |
| Fervidibacteria bacterium JGI | 2645728127\|Ga0097870_126_5\|M | 20 | N | N | 512 |
| MDM2 | | | | | |
| (2645728127\|Ga0097870_126) | | | | | |
| freshwater metagenome | SRR5272259_megahit_k177_4486292_121\|P | 2 | N | N | 341 |
| (SRR5272259) | | | | | |
| freshwater metagenome | SRR5272259_megahit_k177_4486292_118\|M | 2 | N | N | 353 |
| (SRR5272259) | | | | | |
| freshwater metagenome | SRR5273149_megahit_k177_25824_1\|M | 14 | N | N | 514 |
| (SRR5273149) | | | | | |
| freshwater metagenome | SRR5273182_megahit_k177_57442_1\|M | 15 | N | N | 514 |
| (SRR5273182) | | | | | |
| freshwater metagenome | SRR5273183_megahit_k177_82677_3\|M | 3 | N | N | 454 |
| (SRR5273183) | | | | | |
| freshwater sediment metagenome | SRR6481359_megahit_k177_932521_3\|M | 3 | N | N | 373 |
| (SRR6481359) | | | | | |
| fungi-mycelium-attine ant fungus | 3300012677\|Ga0153928_1011778_2\|M | 3 | N | N | 332 |
| gardens | | | | | |
| (3300012677\|Ga0153928_1011778) | | | | | |
| Haloarcula quadrata | WP_121304574.1 | 2 | Y | N | 384 |
| (NZ_RBWW01000003) | | | | | |
| Halohasta litchfieldiae tADL | SEJ25361.1 | 2 | N | N | 382 |
| (277550727412775622397) | | | | | |
| Halorubrum sp. Atlit-26R | WP_121597521.1 | 2 | N | N | 384 |
| (NZ_QPLT01000012) | | | | | |
| Halorubrum tebenquichense DSM | WP_006630662.1 | 4 | N | N | 384 |
| 14210 (AOJDO1000077) | | | | | |
| hot springs metagenome | DRR082460_megahit_k177_106880\|P | 7 | N | N | 535 |
| (DRR082460) | | | | | |
| hot springs metagenome | DRR082460_megahit_k177_106880\|M | 7 | N | N | 537 |
| (DRR082460) | | | | | |
| hot springs metagenome | OGCH01000195_3\|M | 3 | N | N | 546 |
| (OGCH01000195) | | | | | |
| hot springs metagenome | SRR4027810_megahit_k177_26210_1\|M | 17 | N | N | 512 |
| (SRR4027810) | | | | | |
| hot springs metagenome | SRR5247126_megahit_k177_220968_4\|P | 7 | N | N | 532 |
| (SRR5247126) | | | | | |
| lab enrichment-defined media- | 3300027941\|Ga0207719_100292_34\|M | 2 | N | N | 384 |
| aerobic enrichment media | | | | | |
| (3300027941\|Ga0207719_100292) | | | | | |
| lab enrichment-defined media- | 3300027941\|Ga0207719_100292_35\|P | 2 | N | N | 376 |
| aerobic enrichment media | | | | | |
| (3300027941\|Ga0207719_100292) | | | | | |
| landfill metagenome (SRR6484323) | SRR6484323_megahit_k177_106899_4\|P | 3 | N | N | 429 |
| landfill metagenome (SRR6484325) | SRR6484325_megahit_k177_1345066_6\|P | 2 | N | N | 429 |
| landfill metagenome (SRR6484787) | SRR6484787_megahit_k177_1514834_8\|M | 4 | N | N | 468 |
| landfill metagenome (SRR8542065) | SRR8542065_megahit_k177_1115558_2\|M | 3 | N | N | 429 |
| landfill metagenome (SRR8542065) | SRR8542065_megahit_k177_821416_8\|M | 4 | N | N | 440 |
| metagenome (FZPS01000148) | FZPS01000148_2153\|M | 2 | N | N | 417 |
| Natronococcus amylolyticus DSM | WP_005554257.1 | 2 | N | N | 389 |
| 10524 (AOIB01000014) | | | | | |
| peat metagenome (SRR7004341) | SRR7004341_megahit_k177_2665443_5\|P | 2 | N | N | 363 |
| salt lake metagenome (SRR8526178) | SRR8526178_megahit_k177_763700_3\|P | 5 | N | N | 432 |
| sediment metagenome | OVXO01016275_2\|M | 3 | N | N | 358 |
| (OVXO01016275) | | | | | |
| sediment metagenome | SRR7067823_megahit_k177_107253_1\|P | 7 | N | N | 512 |
| (SRR7067823) | | | | | |
| sediment metagenome | SRR7067986_megahit_k177_69094_7\|P | 45 | N | N | 512 |
| (SRR7067986) | | | | | |
| sediment metagenome | SRR8554444_megahit_k177_504614_2\|M | 2 | N | N | 351 |
| (SRR8554444) | | | | | |
| sediment metagenome | SRR8554446_megahit_k177_83048_1\|M | 8 | N | N | 516 |
| (SRR8554446) | | | | | |
| soil metagenome (SRR6201998) | SRR6201998_megahit_k177_1568738_2\|M | 4 | N | N | 359 |
| soil metagenome (SRR8554511) | SRR8554511_megahit_k177_4248910_4\|P | 3 | N | N | 457 |
| soil metagenome (SRR8554511) | SRR8554511_megahit_k177_4248910_4\|M | 3 | N | N | 437 |
| solid waste-landfill-landfill leachate | 3300014204\|Ga0172381_10015437_8\|M | 4 | N | N | 468 |
| (3300014204\|Ga0172381_10015437) | | | | | |
| solid waste-landfill-landfill leachate | 3300014205\|Ga0172380_10102486_2\|M | 2 | N | N | 429 |
| (3300014205\|Ga0172380_10102486) | | | | | |
| terrestrial-soil | 3300031566\|Ga0307378_10048523_2\|M | 2 | N | N | 419 |
| (3300031566\|Ga0307378_10048523) | | | | | |
| wastewater metagenome | SRR6837575_megahit_k177_854481_7\|M | 5 | N | N | 469 |
| (SRR6837575) | | | | | |
| wastewater metagenome | SRR6837576_megahit_k177_1219670_1\|P | 5 | N | N | 469 |
| (SRR6837576) | | | | | |
| wastewater-anaerobic digestor- | 3300009716\|Ga0116191_1022210_3\|P | 4 | N | N | 419 |
| anaerobic digestor sludge | | | | | |
| (3300009716\|Ga0116191_1022210) | | | | | |

TABLE 8
Amino acid sequences of Representative CLUST.196682 Effector Proteins

>3300025638|Ga0208198_1021643_2|P
[wastewater-anaerobic digestor-anaerobic digestor sludge]
MKATTITKSLRFWIDEPPERCRLLYGVSDELTDAYNAILEYWETDVRKVAVEATEAAIEAYHVWKDAPKETRGDKPKWWSADTA
TRAAFLRVGVAATSTIRTRLVDNMVQGEWLRDVKTYMSRRFKDHIAAGIRHRAKGVVISLDQSTMKPDVQLGDDGRWTIRCALW
AQGTEESARNNDRWLLSPYDRKRQTWTIANLLEADQHGEVRGVKLVPPKPGAPAGKRRWSAMITVTLPVESSVLDEERPNVAGV
DMGLTHFAVYSCPARNTFEFVSSRELQAAMEKARRRRRGVPRKRSTALGQKLGRRQDALCRLTARRLIDCCRRDRVGTLRVEDL
TGIRDQGSDDADRNFALGARFPYYKLQTYLEQAAASAGVRLEKVQPAGTSQTCSRCAVRDPESRDGKRFVCRHCGYKGDADLNA
ANNIASGRFRRSIRPSTQPAGRIPSAAPDCTGEAVKASDVDAELQPARTPAACGGDPYAGE
(SEQ ID NO: 601)
>3300005300|Ga0072500_136962_4|M
[aquatic-thermal springs-hot spring]
MEKVILTITSGVEFLQPQDEQLVIKAAKWYTEARKALLYNALQKGEEGVKQAASTLSTLNFPPAPHSRLPDLLTRDVGGTLQAL
KERREGYAQDFSRWWEEICRVANEKGSQAVSVLKPHVNKLSSLIHQLSWNSPEWDEEAQEVFKELKQIWAVVRQKDHERLKIKW
RAEVPPVPRPPRTPKFQRLVFNADGRVSGGSRSNALQIEEREDGDLYLRLQLRDPERVAKKGSYQDVWLRLVIEDEERKQMLKN
FAPKYLQLRQDGKRWIAHIVIERENEFEVPQYVYGVDIGARKYLLAAVAIPLNPALPKPPNIAVPSSKFWQIVERVEAEWRKWQ
QLRTGKRDKEGRVVLKKRKMAWRVLKRKRRMRREVTKSMIAEAVNTFIKSLERPCAIVIEQIKNLHLSPTLQDRKSRWRQRRWA
YRFLLEMLRYKAEWEGIRVIEVNPAYTSQTCPRCGKRDRNARQGNLFQCTKCRFQHNADFVAAYNITVRGLMKLRTRGKVDWKV
LTGKPRVL
(SEQ ID NO: 602)
>CAAACJ01004249 9_2|P
[activated sludge metagenome]
MKATTITKSLRFWIDEPPERCRLLYGVSDELTDAYNAILEYWETDVRKVAVEATEAAIEAYHVWKDAPKETRGDKPKWWSADTA
TRAAFLRVGVAATSTIRTRLVDNMVQGEWLRDVKTYMSRRFKDHIAAGIRHRAKGVVISLDQSTMKPDVQLGDDGRWTIRCALW
AQGTEESARNNDRWLLSPYDRKRQTWTIANLLEADQHGEVRGVKLVPPKPGAPAGKRRWSAMITVTLPVESSVLDEERPNVAGV
DMGLTHFAVYSCPARNTFEFVSSRELQAAMEKARRRRRGVPRKRSTALGQKLGRRQDALCRLTARRIIDCCRRDRVGTLRVEDL
TGIRDQGSDDADRNFALGARFPYYKLQTYLEQAAASAGVRLEKVQPAGTSQTCSRCAVRDPESRDGKRFECRHCGYKGDADLNA
ANNIASGRFRRSIRPSTQPAGRIPSAAPDCTGEAVKASDVDAELQPARTPAACGGDPYAGE
(SEQ ID NO: 603)
>SRR5007116_megahit_k177_300528_2|M
[activated sludge metagenome]
MKATTTTKSLRFWIDEPPERCRLLYGVSDELTAAYNAILEYWETDVRSVAVEVTEAAQAAYHVWKDAPKETRGDKPKWWSADTA
TRAAFLRVGVAATSTIRTRLVDNMVQGEWLRDVKTYMSRRFKDHIAAGIRHRAKGVVISLDQSTMKPDVQLGDDGRWTIRCALW
AQGTEESARNNDRWRLSPYDRRRQTWTIANLLEADQHGEVRGVKLVPPKPGAPAGKRRWSAMITVTLPVESSVLDEERPNVAGV
DMGLTHFAVYSCPARNTFEFVSSRELQAAMEKARRRRRGVPRKRSTALGQKLGRRQDALCRLTARRLIDCCLRDRVGTLRVEDL
TGIRDQGSDDPDRNFALGARFPYYKLQTYLEQAAASAGVRLEKVQPAGTSQTCSRCAVRDPESRDGKRFVCRHCGYKGDADLNA
ANNIASGRFRRSIRPSTQPAGRIPSAAPDCTGEAVEASNVGAELQPAREPVAGGGDPYAGE
(SEQ ID NO: 604)
>SRR5007140_megahit_k177_707372_2|P
[activated sludge metagenome]
MKATTITKSLRFWIDEPPERCRLLYGVSDELTDAYNAILEYWETDVRKVAVEATEAAIEAYHVWKDAPKETRGDKPKWWSADTA
TRAAFLRVGVAATSTIRTRLVDNMVQGEWLRDVKTYMSRRFKDHIAAGIRHRAKGVVISLDQSTMKPDVQLGDDGRWTIRCALW
AQGTEESARNNDRWLLSPYDRKRQTWTIANLLEADQHGEVRGVKLVPPKPGAPAGKRRWSAMITVTLPVESSVLDEERPNVAGV
DMGLTHFAVYSCPARNTFEFVSSRELQAAMEKARRRRRGVPRKRSTALGQKLGRRQDALCRLTARRIIDCCRRDRVGTLRVEDL
TGIRDQGSDDADRNFALGARFPYYKLQTYLEQAAASAGVRLEKVQPAGTSQTCSRCAVRDPESRDGKRFECRHCGYKGDADLNA
ANNIASGRFRRSIRPSTQPAGRIPSAAPDCTGEAVKASDVDAELQPARTPAACGGDPYAGE
(SEQ ID NO: 603)
>SRR5007457_megahit_kl77_513017_2|M
[activated sludge metagenome]
MKATTITKSLRFWIDEPPERCRLLYGVSDELTDAYNAILEYWETDVRKVAVEATEAAIEAYHVWKDAPKETRGDKPKWWSADTA
TRAAFLRVGVAATSTIRTRLVDNMVQGEWLRDVKTYMSRRFKDHIAAGIRHRAKGVVISLDQSTMKPDVQLGDDGRWTIRCALW
AQGTEESARNNDRWLLSPYDRKRQTWTIANLLEADQHGEVRGVKLVPPKPGAPAGKRRWSAMITVTLPVESSVLDEERPNVAGV
DMGITHFAVYSCPARNTFEFVSSRELQAAMEKARRRRRGVPRKRSTALGQKLGRRQDALCRLTARRIIDCCRRDRVGTLRVEDL
TGIRDQGSDDADRNFALGARFPYYKLQTYLEQAAASAGVRLEKVQPAGTSQTCSRCAVRDPESRDGKRFECRHCGYKGDADLNA
ANNIASGRFRRSIRPSTQPAGRIPSAAPDCTGEAVKASDVDAELQPARTPAACGGDPYAGE
(SEQ ID NO: 605)
>SRR5007461_megahit_k177_311051
[activated sludge metagenome]
MIKTVTFYIAEMPREDKRLCDRLCIDLGAAGARMVREWFRACDETPPGAAIDWPEVQRRGVAVGKAMVEAAGYRTELGNDLARA
EFFARFKMEFKKVLKGERASLPFPGRAPFIFLRMDPGHETAIIEQRDDAWYMRNPRFYPGGDSNEANRREWRLKPVDRKGWAEN
ILEAAEKFACVRIMPDRKKPGSWVVKITVHLPDALERKLVEEHECWAGIDLGINCPAVLSIPDRDKGGFVRFFGMDKYTALWAK
LNRYEERKRALNRVGQQHAARDLRAKITGLRQYINEQISREIIDLCLRMHVTGIRMEDLKGLRTEGTGKLKYWPRFHLTTRIEQ
KAREVGLAFEQIRAAGTSQTCSVCGHRHRDNRHGSDFLCLRCGFARHADVNAANNIARGMQDFDLPAGSAAPGRALRLELSAQ
(SEQ ID NO: 606)
>3300027896|Ga0209777_10000273_30|P
[aquatic-freshwater-freshwater lake sediment]
MTATKQQILQTEYDNLQHFLQTGEDLGVYSANKQQAKRYYKTIKPEHQYPLSIRNDLIQVQHKPNSIAEYWLKIPVKGRRGGLW
VAIRPHQQIPDNAEFLESKIRRKRKGWFANIVIQKQIEPIRTKNILAVDLGEHVIATVCGSFDNQRPRFYGRDVRGIRRHYAWL
RKRLGEKKLLGVIRRIKDTEKRKVNDTLHKISRSIVDLAQEHNATIVLGELQGIRNHAKGRRMNRIVSNMPYLKLSQMIEYKAE
WLGIPVIKMQEHDTSKTCSRCNEYGKRPTQGQFRCDTCHRTSFNADYNGALNILKRATSYMDIAGAVSEPARDWGNDDQTSEAT
QLFEW
(SEQ ID NO: 607)
>3300027896|Ga0209777_10000273_32|M
[aquatic-freshwater-freshwater lake sediment]
MAQKTITAKIVAMTATKQQILQTEYDNLQHFLQTGEDLGVYSANKQQAKRYYKTIKPEHQYPLSIRNDLIQVQHKPNSIAEYWL
KIPVKGRRGGLWVAIRPHQQIPDNAEFLESKIRRKRKGWFANIVIQKQIEPIRTKNILAVDLGEHVIATVCGSFDNQRPRFYGR
DVRGIRRHYAWLRKRLGEKKLLGVIRRIKDTEKRKVNDTLHKISRSIVDLAQEHNATIVLGELQGIRNHAKGRRMNRIVSNMPY
LKLSQMIEYKAEWLGIPVIKMQEHDTSKTCSRCNEYGKRPTQGQFRCDTCHRTSFNADYNGALNILKRATSYMDIAGAVSEPAR
DWGNDDQTSEATQLFEW
(SEQ ID NO: 608)
>3300013127|Ga0172365_10030480_1|M
[aquatic-freshwater-sediment]
MANRELVVVMQVQKVVKGKVVGLTHAKRQILDHEYEGLQRFLQGDSNVELYSANKQQAKRFYKTVKPEREYPLSIRKDLIRVER
RDTKIARYWARIPAKLRRGGVWVAVKPHCEITDDLEICESKLLRRNGEYFLHLAVKREVELNTSYSSVLAIDLGIRHVACSVDT
RSGETHFHGRELRRVRGHYFHLRRRLGEKKLLKVIKRIGARESRITNDQLHKIAKAIVDEAERLNALIAIGNPKGIRRNGKGRR
FNRKLNSWPFWKLRQYIEYKANWRGIAVVEVNEAYTSQRCWRCGTIGTRSGTHHGLFECPRCGLRENADRNGAFNIGRRALGQV
SKVGAVVSQPVTGAVPFSELGSVVQCPTPEATLFKGW
(SEQ ID NO: 609)
>3300013128|Ga0172366_10002984_1|M
[aquatic-freshwater-sediment]
MANRELVVVMQVQKVVKAKVVGLTHAKRQILDHEYEGLQRFLQGDSNVELYSANKQQAKRFYKTVKPEREYPLSIRKDLIRVER
RDTKIARYWARIPAKLRRGGVWVAVKPHCEITDDLEICESKLLRRNGEYFLHLAVKREVELNTSYSSVLAIDLGIRHVACSVDT
RSGETHFHGRELRRVRGHYFHLRRRLGEKKLLKVIKRIGARESRITNDQLHKIAKAIVDEAERLNALIAIGNPKGIRRNGKGRR
FNRKLNSWPFWKLRQYIEYKANWRGIAVVEVNEAYTSQRCWRCGTIGTRSGTHHGLFECPRCGLRENADRNGAFNIGRRALGQV
SKVGAVVSQPVTGAVPFSELGSVVQCPTPEATLFKGW
(SEQ ID NO: 610)
>3300013129|Ga0172364_10030775_1|P
[aquatic-freshwater-sediment]
MANRELVVVMQVQKVVKGKVVGLTHAKRQILDHEYEGLQRFLQGDSNVELYSANKQQAKRFYKTVKPEREYPLSIRKDLIRVER
RDTKIARYWARIPAKLRRGGVWVAVKPHCEITDDLEICESKLLRRNGEYFLHLAVKREVELNTSYSSVLAIDLGIRHVACSVDT
RSGETHFHGRELRRVRGHYFHLRRRLGEKKLLKVIKRIGARESRITNDQLHKIAKAIVDEAERLNALIAIGNPKGIRRNGKGRR
FNRKLNSWPFWKLRQYIEYKANWRGIAVVEVNEAYTSQRCWRCGTIGTRSGTHHGLFECPRCGLRENADRNGAFNIGRRALGQV
SKVGAVVSQPVTGAVPFSELGSVVQCPTPEATLFKGW
(SEQ ID NO: 609)
>3300013130|Ga0172363_10005240_1|P
[aquatic-freshwater-sediment]
MANRELVVVMQVQKVVKGKVVGLTHAKRQILDHEYEGLQRFLQGDSNVELYSANKQQAKRFYKTVKPEREYPLSIRKDLIRVER
RDTKIARYWARIPAKLRRGGVWVAVKPHCEITDDLEICESKLLRRNGEYFLHLAVKREVELNTSYSSVLAIDLGIRHVACSVDT
RSGETHFHGRELRRVRGHYFHLRRRLGEKKLLKVIKRIGARESRITNDQLHKIAKAIVDEAERLNALIAIGNPKGIRRNGKGRR
FNRKLNSWPFWKLRQYIEYKANWRGIAVVEVNEAYTSQRCWRCGTIGTRSGTHHGLFECPRCGLRENADRNGAFNIGRRALGQV
SKVGAVVSQPVTGAVPFSELGSVVQCPTPEATLFKGW
(SEQ ID NO: 609)
>3300013133|Ga0172362_10039269_3|M
[aquatic-freshwater-sediment]
MANRELVVVMQVQKVVKGKVVGLTHAKRQILDHEYEGLQRFLQGDSNVELYSANKQQAKRFYKTVKPEREYPLSIRKDLIRVER
RDTKIARYWARIPAKLRRGGVWVAVKPHCEITDDLEICESKLLRRNGEYFLHLAVKREVELNTSYSSVLAIDLGIRHVACSVDT
RSGETHFHGRELRRVRGHYFHLRRRLGEKKLLKVIKRIGARESRITNDQLHKIAKAIVDEAERLNALIAIGNPKGIRRNGKGRR
FNRKLNSWPFWKLRQYIEYKANWRGIAVVEVNEAYTSQRCWRCGTIGTRSGTHHGLFECPRCGLRENADRNGAFNIGRRALGQV
SKVGAVVSQPVTGAVPFSELGSVVQCPTPEATLFKGW
(SEQ ID NO: 609)
>3300032070|Ga0315279_10000130_51|M
[aquatic-freshwater-sediment]
MILQKTVNAKLFALTRTKEQKISREYWNFQKALHGEDAPLYSATKQQAKRKNAWNGDCEYPLVLRRDCFGVKELGLKFARWWAK
IPVFGGSIWCPVQLPYVQEPLLKGNIRETKLVRRKKGWFLRITVQQEIELDVPCASVVGVDFGERHIATSVEWQGRFQNPIFYG
AEVRGIRRHYAWLRKRLGNKKALRTIKKVGGKENRKVNAVLHNISRAIVDRAKELSAVILLGAPNGGSMRRKALSKGKRFTRIV
YSMPYYRLRQFIEYKAVQEGILVVNANEEWTSKTCSFCGEISDRPRQDLIVCPHGHRLNADINACRNLIKRFIDHWLIDGAILA
SPKLPH
(SEQ ID NO: 611)
>3300032118|Ga0315277_10001250_38|M
[aquatic-freshwater-sediment]
MKSQKIIKCKITYLTNIKAQQLETEHHNLQNLLQLEREGLDFLPIYQNIPLHSANKQQALRFYKRISTDKIYAISIRNDIIKVE
LKPNNKISKYWCKIPVKQRYGGIWVAIKPHKKDIDFSQYKLGESKLFKKKNEWWIYITIIREVQIKDSYSNILGIDLGSKVIAT
VCGSFYNQRPTFYGREVRGIRRHYQYIRTELGKKKLLKKIKQLSDKEHRIVNDLLHKISKQIVEKAEQTDSYIVLGDLKGIRNS
TKNKGRNFRRIVSNMPYLKLTQFIEYKAKEKGIKIIRISEKGTSKICSKCGYEDKGNRKSQGLFKCKQCGFELNADANGARNIL
KFSDGYTLPERAMSELALNSNQLEKPTCFSGG
(SEQ ID NO: 612)
>3300024429|Ga0209991_10029076_1|P
[aquatic-marine-deep subsurface]
MLVEKTVKAKVIAPTNRKQELLDREYQSFQYTLYGGEANLYSATKQQAERFLRKIKTPKHRHYPLILRRDVIRLERQETKVAPY
WFKFPVFGVRGGIWLGLKPHCDIPVDCSLREAKLIRRKNAWFIHLTIQKEVPESIIDEHHILAVDLGERYLATVCGNNGTNPQF
LGKEVRGIRRHYAWIRKRLGERKLLNTTRKVGHTEQKKVNDICHQISRRIVNEARETDSVIILGDLKGIRKNAKGKRMNRIVSN
MPYYKLTQFIKYKAAWDGVPVLVIPEAYTSKGCHRCGSLGSRPYRGLFLCHSCKLHYNADLNGARNILKRALDYMSSAGAALAQ
PVTQSLN
(SEQ ID NO: 613)
>3300014886|Ga0180300_10007429_2|M
[aquatic-marine-marine sediment]
MKVKKTIKAKILELRKGKEELLKREYENWQRYLRGDKTVPLYSATKQQADRLLKRLKGRLKPNKEYPMILRRDVYRANTKLTPY
WLKISIYGVRGGINVPIKTHEPITEDMVCREAKIIRKGDEWFVYITVEKEVEERNPKSILAIDLGIRWMATTVNSNNPKPNFYG
KELRKVKGHYFYLRRSLTLKKAYKTIKKIGLKERRVVNDILHKISRAIVNEALENDSMIVLGNLKGIRRNGKGRRFNRKLNNGF
PYYRLSQFIEYKAKWLGIKVIKISEKNTSKLCHKCGEEGVRVGSSFKCPNCGYSCHADYNGAMNILKRAMGLVSVAGAGLTQPR
TRYDEARRPKNRESPHLSGKSVKSYSFKF
(SEQ ID NO: 614)
>SEJ25361.1
[aquatic-non marine saline and alkaline-hypersaline]
MKQTAEKTVVAKIFTNDLTQSKLDAINHEYEAFQRYIRGDEEADLYSATKQCADAYVDTDNLRDDHDYPWFIRNDVFDVGVDVE
QHDTDLTDWWLKLPVSQVWGGVNVPIQPHDEIPDEADVKDSKIVRVNGDYYAHLTVQQEVEVSEEYGGVIGVDFGVRWVATSVA
LPSRNTEFYGREIRRIRRHHHDLRTRLQEKGAYGTLQSVKVKEYRQVNDRLHKISRAIVEEAKECDALIVVGDLEGIQNQDLGA
EMNRRLHSMPHHTLKTYIEYKAMFAGIAVKSVNEYMTSQTCWRCGEQEATTRKGQGQHLCHECGLDDNADKNGATNIAKKGLGK
DIACPLSSLGAVCEPVLGPSGADQASATVCLRADLEAPASTKRTVR
(SEQ ID NO: 615)
>3300005935|Ga0075125_10033396_1|P
[aquatic-non marine saline and alkaline-saline lake]
MSLKTLTFWPIGMSAKYRRIFDNIRKQLGAAQREMVKAWLRLALAEDAYGIDPGKRAGREVFGDNEYSNDLLNNLAYADAHENF
KQQWKRVRSGNATSVSFSDAAANVLFLMPPSGGHHATVEHIDGNWWITRLKVFGGCTKADRERNDQFRWQLKGVSRFGGKYEKD
LMDGAQRICQVRVITSRKDPSKYVVQVTVEVPDLQTVGARTPVCAGIDLGINCPVVLSIPDKGFVQFMGRERDEYPRLWEKLRE
YEDRKRRLNRAGKRRAARDLRPRITNVRKYINEAISKDVADTCRALGVTHLRMEDLKGLSRHKSMTGKLRYWPRYHLQERIERK
CCEVGIEVERIKPAGTSQTCSVCGHREKANRNGAQFVCIECGYQQHADLNAANNIARGMQTFGPCAKSSASDDAIGLRFDSEGQ
ESALGQAKRLFA
(SEQ ID NO: 616)
>3300025736|Ga0207997_1027507_2|M
[aquatic-non marine saline and alkaline-saline lake]
MSLKTLTFWPIGMSAKYRRIFDNIRKQLGAAQREMVKAWLRLALAEDAYGIDPGKRAGREVFGDNEYSNDLLNNLAYADAHENF
KQQWKRVRSGNATSVSFSDAAANVLFLMPPSGGHHATVEHIDGNWWITRLKVFGGCTKADRERNDQFRWQLKGVSRFGGKYEKD
LMDGAQRICQVRVITSRKDPSKYVVQVTVEVPDLQTVGARTPVCAGIDLGINCPVVLSIPDKGFVQFMGRERDEYPRLWEKLRE
YEDRKRRLNRAGKRRAARDLRPRITNVRKYINEAISKDVADTCRALGVTHLRMEDLKGLSRHKSMTGKLRYWPRYHLQERIERK
CCEVGIEVERIKPAGTSQTCSVCGHREKANRNGAQFVCIECGYQQHADLNAANNIARGMQTFGPCAKSSASDDAIGLRFDSEGQ
ESALGQAKRLFA
(SEQ ID NO: 616)
>3300007203|Ga0099832_1115789_2|M
[aquatic-thermal springs]
MKKVVITVTTGVEFLQPQDEQIVRKAAEWYTKAREALFAHALQQGKVKEAASTLRTLNFPMAPHSRLPDLLTRDVGGILKALKE
KREGYLGEFKRWWEEDCRVANEKGSQAVADLKTHVGKLLNLVHQLPWNSPVWDGEAQEAFKNLKEAWAVVRQKDREQLKIRWRA
EVSPLRRPPRITKFQRLVFNADGRVSGGSKSEALQIEEREDGDLYLRLQLRDPEGVVGGGAYQEVWLRLVVEDEERKQMLRDFA
PKYLQLRQDGKRWIAHIVIEREIKFGLKGIMWTAGDYLYGVDIGARKYLLAAVAVPLKPGLPKLPNIAIPSGKFWQAVERVEAE
WRKWQRLRTGKKDKEGKVVLKKRTAWRVLKRKRRMRREVAKNMIAEAVNTFINFIKGDNVDIRLWLAIEQIKNLNLSPAFQDRK
SRWRQRRWAYRLLLEMLRYKAEWEGIRVIEVNPAHTSQICPRCGKKDGKARQGNRFCCTKCKFQHNADFVAAYNIAVRALKKLG
MREEIGWKVLTGKPRVL
(SEQ ID NO: 617)
>3300000083|Ga0072500_119562_4|M
[aquatic-thermal springs-hot spring]
MKHLVSNAQVNEKNEARLTLKCGLEFENAEGEELVKRAAEWYCKARIFLLSYALKNNKTRVQKIASLLKSEGFPSPPHPRLIDL
LQRTITPAIKNMRRLRRRYPKTLRAWFDRVKKFAEEKGSDAAERLQPYVEDLLQLVKNLPINSPAWDTDAQEKWKELKKLWGKV
RESDWKKGIVWKFQIPNPKKPPSTPAFRCADSSNIFVTADYRMSGKNARNSYDMKTDSEENLWVLVRLDDVDGDVKVRKDVWIK
LCVDKSRYDLLRIGKITEIKILRNRDGRWEGRIVVKMNAGYNSPQVVVGVDVGASEHLIAAVGIPLDGSNNNFLLSVPASYFWK
RVEQAERLWRRWQRLYTGRTSEKKKAPILPRRRKAYQILKRNRNWRREVTKHCIFHAVKKFVQLLPPNSVVVVENLKDIPPNVW
KEDKDKRFRRWVYAFLLFTLKYKCQQRKIAVIAVSPHNTSQTCPRCGVVDPKSRGLWKDGELISRKHFCCTQCKFTHNADFVAA
HNIAVLGAKALGITLPESWRALRGEVQYVIPYQNMPKVRKSW
(SEQ ID NO: 618)
>3300008000|Ga0105162_1004089_4|M
[aquatic-thermal springs-hot spring]
MNNKQVTFGGLFLMALQKKRVRRTIVAGVEIESAEEENLVTEAAKWYLQAKQKLLQYAIEKRKERITAPARILKDELKLPEPPH
SRLPDELAQVINGVLKALKKRRTEYLRRFQDWWNKVVEVGNQHGLESYRAMKPKVEALISSVPNNPFDPTWDSDIQKRFAEVKE
IWSKIRLKDSNERNFRWRYHVPPLVKPPKTPEFKLLGFDAGARVSGGGKAKTLTIKSQDGEIFLRLLLRQPGVSNHGRGSYREI
WLHIILEDESRKALLLSDKVQAKFIRLRRRTDKWEAHITVEKEVSFEKPRVIYGIDIGMKDALLFCVPIFIDSQETTETASEGK
KLIVVEAGQFWHRLEVEDAQWRKWQFRRSGKVKEGIKGKRMVWRILKRRRRRRREVTKHLIHQIVNALISQLQRPCAVAIERLK
GLRNKPHLTDKRSQWKFHRWAYRFLLETLRYKLEWEGIMIIEVPPYGTSQTCPRCSHRDKRSRDGRRFRCTKCKFQHNADAAGA
FNIAMRAVEQLQSSRDLQEVSIAESAWKILTGKPMVLKY
(SEQ ID NO: 619)
>3300008000|Ga0105162_1004089_4|P
[aquatic-thermal springs-hot spring]
MALQKKRVRRTIVAGVEIESAEEENLVTEAAKWYLQAKQKLLQYAIEKRKERITAPARILKDELKLPEPPHSRLPDELAQVING
VLKALKKRRTEYLRRFQDWWNKVVEVGNQHGLESYRAMKPKVEALISSVPNNPFDPTWDSDIQKRFAEVKEIWSKIRLKDSNER
NFRWRYHVPPLVKPPKTPEFKLLGFDAGARVSGGGKAKTLTIKSQDGEIFLRLLLRQPGVSNHGRGSYREIWLHIILEDESRKA
LLLSDKVQAKFIRLRRRTDKWEAHITVEKEVSFEKPRVIYGIDIGMKDALLFCVPIFIDSQETTETASEGKKLIVVEAGQFWHR
LEVEDAQWRKWQFRRSGKVKEGIKGKRMVWRILKRRRRRRREVTKHLIHQIVNALISQLQRPCAVAIERLKGLRNKPHLTDKRS
QWKFHRWAYRFLLETLRYKLEWEGIMIIEVPPYGTSQTCPRCSHRDKRSRDGRRFRCTKCKFQHNADAAGAFNIAMRAVEQLQS
SRDLQEVSIAESAWKILTGKPMVLKY
(SEQ ID NO: 620)
>3300022544|Ga0212120_1002806_5|M
[aquatic-thermal springs-hot spring]
MNNKQVTFGGLFLMALQKKRVRRTIVAGVEIESAEEENLVTEAAKWYLQAKQKLLQYAIEKRKERITAPARILKDELKLPEPPH
SRLPDELAQVINGVLKALKKRRTEYLRRFQDWWNKVVEVGNQHGLESYRAMKPKVEALISSVPNNPFDPTWDSDIQKRFAEVKE
IWSKIRLKDSNERNFRWRYHVPPLVKPPKTPEFKLLGFDAGARVSGGGKAKTLTIKSQDGEIFLRLLLRQPGVSNHGRGSYREI
WLHIILEDESRKALLLSDKVQAKFIRLRRRTDKWEAHITVEKEVSFEKPRVIYGIDIGMKDALLFCVPIFIDSQETTETASEGK
KLIVVEAGQFWHRLEVEDAQWRKWQFRRSGKVKEGIKGKRMVWRILKRRRRRRREVTKHLIHQIVNALISQLQRPCAVAIERLK
GLRNKPHLTDKRSQWKFHRWAYRFLLETLRYKLEWEGIMIIEVPPYGTSQTCPRCSHRDKRSRDGRRFRCTKCKFQHNADAAGA
FNIAMRAVEQLQSSRDLQEVSIAESAWKILTGKPMVLKY
(SEQ ID NO: 619)
>3300022544|Ga0212120_1002806_5|P
[aquatic-thermal springs-hot spring]
MALQKKRVRRTIVAGVEIESAEEENLVTEAAKWYLQAKQKLLQYAIEKRKERITAPARILKDELKLPEPPHSRLPDELAQVING
VLKALKKRRTEYLRRFQDWWNKVVEVGNQHGLESYRAMKPKVEALISSVPNNPFDPTWDSDIQKRFAEVKEIWSKIRLKDSNER
NFRWRYHVPPLVKPPKTPEFKLLGFDAGARVSGGGKAKTLTIKSQDGEIFLRLLLRQPGVSNHGRGSYREIWLHIILEDESRKA
LLLSDKVQAKFIRLRRRTDKWEAHITVEKEVSFEKPRVIYGIDIGMKDALLFCVPIFIDSQETTETASEGKKLIVVEAGQFWHR
LEVEDAQWRKWQFRRSGKVKEGIKGKRMVWRILKRRRRRRREVTKHLIHQIVNALISQLQRPCAVAIERLKGLRNKPHLTDKRS
QWKFHRWAYRFLLETLRYKLEWEGIMIIEVPPYGTSQTCPRCSHRDKRSRDGRRFRCTKCKFQHNADAAGAFNIAMRAVEQLQS
SRDLQEVSIAESAWKILTGKPMVLKY
(SEQ ID NO: 620)
>3300025063|Ga0209493_1003385_3|M
[aquatic-thermal springs-hot spring]
MEKVILTITSGVEFLQPQDEQLVIKAAKWYTEARKALLYNALQKGEEGVKQAASTLSTLNFPPAPHSRLPDLLTRDVGGTLQAL
KERREGYAQDFSRWWEEICRVANEKGSQAVSVLKPHVNKLSSLIHQLSWNSPEWDEEAQEVFKELKQIWAVVRQKDHERLKIKW
RAEVPPVPRPPRTPKFQRLVFNADGRVSGGSRSNALQIEEREDGDLYLRLQLRDPERVAKKGSYQDVWLRLVIEDEERKQMLKN
FAPKYLQLRQDGKRWIAHIVIERENEFEVPQYVYGVDIGARKYLLAAVAIPLNPALPKPPNIAVPSSKFWQIVERVEAEWRKWQ
QLRTGKRDKEGRVVLKKRKMAWRVLKRKRRMRREVTKSMIAEAVNTFIKSLERPCAIVIEQIKNLHLSPTLQDRKSRWRQRRWA
YRFLLEMLRYKAEWEGMRVIEVNPAYTSQTCPRCGERDRNARQGNLFRCTKCRFQHNADFVAAYNITVRGLMKLRTRGRIDWKI
LTGKPRVL
(SEQ ID NO: 621)
>3300025090|Ga0209080_1004127_5|M
[aquatic-thermal springs-hot spring]
MLQYAIEKRKERITAPARILKDELKLPEPPHSRLPDELAQVINGVLKALKKRRTEYLRRFQDWWNKVVEVGNQHGLESYRAMKP
KVEALISSVPNNPFDPTWDSDIQKRFAEVKEIWSKIRLKDSNERNFRWRYHVPPLVKPPKTPEFKLLGFDAGARVSRGGKAKTL
TIKSQDGEIFLRLLLRQPGVSNHGRGSYREIWLHIILEDESRKALLLSDKVQAKFIRLRRRTDKWEAHITVEKEVSFEKPRVIY
GIDIGMKDALLFCVPIFIDSQETTETASEGKKLIVVEAGQFWHRLEVEDAQWRKWQFRRSGKVKEGIKGKRMVWRILKRRRRRR
REVTKHLIHQIVNALISQLQRPCAVAIERLKGLRNKPHLTDKRSQWKFHRWAYRFLLETLRYKLEWEGIMIIEVPPYGTSQTCP
RCSHRDKRSRDGRRFRCTKCKFQHNADAAGAFNIAMRAVEQLQSSRDLQEVSIAESAWKILTGKPMVLKY
(SEQ ID NO: 622)
>3300025440|Ga0209741_1005495_1|M
[aquatic-thermal springs-hot spring and microbial mat streamer]
MEKVVITITTGVEFLQPQDEQIVRKAAEWYTKAREALFDHALQQGKVKKAASTLRTLNLPMAPHSRLPDLLTRDVGGILKALKE
KRKGYLREFKRWWKEVCKVANEKGSQAVAVLKPHVDKLLNLVRQLPWNSPVWDGEAQEAFKNLKEAWAVVRQKDREQLKIKWRA
EVSPLRRPPRTPKFQRLVFNADGRVSGGSKSEALQIEEREDGDLYLRLQLRDPEGVVGGGAYQEVWLRLVVEDEERKQMLRDFA
PKYLQLRQDGKRWIAHIVIEREIKFGLKGIMWTAGDYLYGVDIGARKYLLAAVAVPLKPGLPKLPNIAIPSGKFWQAVERVEAE
WRKWQRLRTGKKDKEGKVVLKKRTAWRVLKRKRHMRREVAKNMIAEAVNTFINFIKGDNVDIRLWLAIEQIKNLNLSPAFQDRK
SRWRQRRWAYRLLLEMLRYKAEWEGIRVIEVNPAHTSQICPRCGKKDGKARQGNRFCCTECKFQHNADFVAAYNIAVRALKKLG
MREEIGWKVLTGKPRVL
(SEQ ID NO: 623)
>3300028675|Ga0272445_1001731_11|M
[aquatic-thermal springs-sediment]
MKKVVITITTGVEFLQPQDEQIVRKAAEWYTKAREALFAHALQQQQGKVEKAASTLRTLNFPMAPHSRLPDLLTRDVGGILKAL
KEKREGYLGEFKRWWEEVCRVANEKGSQAVAALKTHVDKLLNLVHQLPWNSPVWDGEAQEAFKNLKEAWAVVRQKDREQLKIKW
RAEVSPLRRPPRTPKFQRLVFNADGRVSGGSKSEALQIEEREDGDLYLRLQLRDPEGVVGGGAYQEVWLRLVVEDEERKQMLRD
FAPKYLQLRQDGKRWIAHIVIEREIKFGKPDYLYGVDIGARKYLLAAVAVPLKPDLPKLPNIAIPSGKFWQAVERVEAEWRKWQ
RLRTGKKDKEGRVVLKKRTAWRVLKRKRRMRREVAKNMIAEAVNTFINFIKGDNVDIRLWLAIEQIKNLNLSPAFQDRKSRWRQ
RRWAYRLLLEMLRYKAEWEGIRVIEVNPAHTSQICPRCGKKDGKARQGNRFCCTKCKFQHNADFVAAYNIAVRALKKLGMREEI
GWKVLTGKPKVL
(SEQ ID NO: 624)
>3300029977|Ga0272449_1037372_1|p
[aquatic-thermal springs-sediment]
MKKVVITITTGVEFLQPQDEQIVRKAAEWYTKAREALFAHALQQQQGKVEKAASTLRTLNFPMAPHSRLPDLLTRDVGGILKAL
KEKREGYLGEFKRWWEEVCRVANEKGSQAVAALKTHVDKLLNLVHQLPWNSPVWDGEAQEAFKNLKEAWAVVRQKDREQLKIRW
RAEVSPLRRPPRTPKFQRLVFNADGRVSGGSKSEALQIEEKEDGDLYLRLQLRDPEGIVGGGAYQEVWLRLVVEDEERKQMLRD
FAPKYLQLRQDGERWIAHIVIEREIKFGKPDYLYGVDIGARKYLLAAVAVPLKPDLPKLPNIAIPSGKFWQAVERVEAEWRKWQ
RLRTGKKDKEGRVVLKKRTAWRVLKRKRRMRREVAKNMIAEAVNTFINFIKGDNVDIRLWLAIEQIKNLNLSPAFQDRKSRWRQ
RRWAYRLLLEMLRYKAEWEGIRVIEVNPAHTSQICPRCGKKDGKARQGNRFCCTKCKFQHNADFVAAYNIAVRALKKLGMREEI
GWKVLTGKPKVL
(SEQ ID NO: 625)
>SRR1562008_megahit_k177_216982_5|P
[fermentation metagenome]
MIKTATFYLADMPQEDKRLCQLLCDELGAAGSAMVREWYRACDEVDGERINWGDVQARGVQVGKQAFADRGYRGELVNDLQRAE
FFARFKTEFKKIAAGERASLPFPGSAPFIFLRMDPGREVASVVNEGGTWYLCNPHFYPGGSRSEDNRREWRLKDVGRNGWGYAI
LAEAEKFACIRIMPDRKKRGSWVVKITVHLPDAIARREVEKQEVWAGIDLGLNCPAVLSIPDHPDGGFVRFLGNDQYPRLWKRL
DDYEERKRVLNRAGKREAARDLRAKITGVRQHINELISREIVDLCLAMRVTGLRMEDLKGLGVEGSGRLKFWPRFHLVTRIEQK
CGEVGLTFEKIKPAGTSQTCSSCGHRDKDNRNGPDFVCLRCGFARHADVNAANNIARGMDDFDLPTGASAPTKARRLEIAS
(SEQ ID NO: 626)
>UOPD01011681_4|M
[fermentation metagenome]
MIKTATFYLADMPQEDKRLCQLLCDELGAAGSAMVREWYRACDEVDGERINWGDVQARGVQVGKQAFADRGYRGELVNDLQRAE
FFARFKTEFKKIAAGERASLPFPGSAPFIFLRMDPGREVASVVNEGGTWYLCNPHFYPGGSRSEDNRREWRLKDVGRNGWGYAI
LAEAEKFACIRIMPDRKKRGSWVVKITVHLPDAIARREVEKQEVWAGIDLGLNCPAVLSIPDHPDGGFVRFLGNDQYPRLWKRL
DDYEERKRVLNRAGKREAARDLRAKITGVRQHINELISREIVDLCLAMRVTGLRMEDLKGLGVEGSGRLKFWPRFHLVTRIEQK
CGEVGLTFEKIKPAGTSQTCSSCGHRDKDNRNGPDFVCLRCGFARHADVNAANNIARGMDDFDLPTGASAPTKARRLEIAS
(SEQ ID NO: 626)
>2645728127|Ga0097870_126_5|M
[Fervidibacteria bacterium JGI MDM2]
MEKVILTITSGVEFLQPQDEQLVIKAAKWYTEARKALLYNALQKGEEGVKQAASTLSTLNFPPAPHSRLPDLLTRDVGGTLQAL
KERREGYAQDFSRWWEEICRVANEKGSQAVSVLKPHVNKLSSLIHQLSWNSPEWDEEAQEVFKELKQIWGVVKQKDHERLKIKW
CAEVPPVPRPPRTPKFQRLVFNADGRVSGGSRSNALQIEEREDGDLYLRLQLRDPERVAKKGSYQDVWLRLVIEDEERKQMLKN
FAPKYLQLRQDGKRWIAHIVIERENEFEVPQYVYGVDIGARKYLLAAVAIPLNPALPKPPNIAVPSSKFWQIVERVEAEWRKWQ
QLRTGKRDKEGRVVLKKRKMAWRVLKRKRRMRREVTKSMIAEAVNTFIKSLERPCAIVIEQIKNLHLSPTLQDRKSRWRQRRWA
YRFLLEMLRYKAEWEGMRVIEVNPAYTSQTCPRCGERDRNARQGNLFRCTKCRFQHNADFVAAYNITVRGLMKLRTRGRIDWKI
LTGKPRVL
(SEQ ID NO: 627)
>SRR5272259_megahit_k177_4486292_121|P
[freshwater metagenome]
MTATKQQILQTEYDNLQHFLQTGEDLGVYSANKQQAKRYYKTIKPEHQYPLSIRNDLIQVQHKPNSIAEYWLKIPVKGRRGGLW
VAIRPHQQIPDNAEFLESKIRRKRKGWFANIVIQKQIEPIRTKNILAVDLGEHVIATVCGSFDNQRPRFYGRDVRGIRRHYAWL
RKRLGEKKLLGVIRRIKDTEKRKVNDTLHKISRSIVDLAQEHNATIVLGELQGIRNHAKGRRMNRIVSNMPYLKLSQMIEYKAE
WLGIPVIKMQEHDTSKTCSRCNEYGKRPTQGQFRCDTCHRTSFNADYNGALNILKRATSYMDIAGAVSEPARDWGNDDQTSEAT
QLFEW
(SEQ ID NO: 607)
>SRR5272259_megahit_k177_4486292_1|M
[freshwater metagenome]
MAQKTITAKIVAMTATKQQILQTEYDNLQHFLQTGEDLGVYSANKQQAKRYYKTIKPEHQYPLSIRNDLIQVQHKPNSIAEYWL
KIPVKGRRGGLWVAIRPHQQIPDNAEFLESKIRRKRKGWFANIVIQKQIEPIRTKNILAVDLGEHVIATVCGSFDNQRPRFYGR
DVRGIRRHYAWLRKRLGEKKLLGVIRRIKDTEKRKVNDTLHKISRSIVDLAQEHNATIVLGELQGIRNHAKGRRMNRIVSNMPY
LKLSQMIEYKAEWLGIPVIKMQEHDTSKTCSRCNEYGKRPTQGQFRCDTCHRTSFNADYNGALNILKRATSYMDIAGAVSEPAR
DWGNDDQTSEATQLFEW
(SEQ ID NO: 608)
>SRR5273149_megahit_k177_25824_1|M
[freshwater metagenome]
MEKVVITITTGVEFLQPQDEQIVRKAAEWYTKAREALFAHALQQGKVKKAASTLRTLNLPMAPHSRLPDLLTRDVGGILKALKE
KREGYLREFKRWWEEVCRVANEKGSQAVAALKTHVDKLLNLVHQIPWNSPVWDGEAQEAFKNLKEAWAVVRQKDREQLKIKWRA
EVSPLRRPPRKPKFQRLVFNADGRVSGGSRAEALQIEEREEGDLYLRLRLRDPEGVVGGGAYQEVWLRLVIEDEGRKQMLRDFA
PKYLQLRQDGKRWIAHIVIEREIKFGEPDYLYGVDIGARKYLLAAVAVPLKPDLPKLPNIAIPSGEFWQAVERVEAEWRKWQRL
RTGKKDKEGRVVLKKKRMAWRVLKRKRRMRREVAKNMIAEAVNTFINFIKRGNVNSGLAIEQIKNLNLSPTLQDRKSRWRQRRW
AYRLLLEMLRYKAEWEGIRVIEVNPTHTSQICPRCRKKDGKARQGNRFCCTKCHFQHNADFVAAYNIAMRGLRKLGMRGEIGWK
VLTGKPRVLQ
(SEQ ID NO: 628)
>SRR5273182_megahit_k177_57442_1|M
[freshwater metagenome]
MEKVVITITTGVEFLQPQDEQIVRKAAEWYTKAREALFAHALQQGKVKKAASTLRTLNLPMAPHSRLPDLLTRDVGGILKALKE
KREGYLREFKRWWEEVCRVANEKGSQAVAALKTHVDKLLNLVHQIPWNSPVWDGEAQEAFKNLKEAWAVVRQKDREQLKIKWRA
EVSPLRRPPRKPKFQRLVFNADGRVSGGSRAEALQIEEREEGDLYLRLRLRDPEGVVGGGAYQEVWLRLVIEDEGRKQMLRDFA
PKYLQLRQDGKRWIAHIVIEREIKFGEPDYLYGVDIGARKYLLAAVAVPLKPDLPKLPNIAIPSGEFWQAVERVEAEWRKWQRL
RTGKKDKEGRVVLKKKRMAWRVLKRKRRMRREVAKNMIAEAVNTFINFIKRGNVNSGLAIEQIKNLNLSPTLQDRKSRWRQRRW
AYRLLLEMLRYKAEWEGIRVIEVNPTHTSQICPRCRKKDGKARQGNRFCCTKCHFQHNADFVAAYNIAMRGLRKLGMRGEIGWK
VLTGKPRVLQ
(SEQ ID NO: 628)
>SRR5273183_megahit_k177_82677_3|M
[freshwater metagenome]
MAPHSRLPDLLTRDVGGILKALKEKREGYLREFKRWWEEVCRVANEKGSQAVAALKTHVDKLLNLVHQIPWNSPVWDGEAQEAF
KNLKEAWAVVRQKDREQLKIKWRAEVSPLRRPPRKPKFQRLVFNADGRVSGGSRAEALQIEEREEGDLYLRLRLRDPEGVVGGG
AYQEVWLRLVIEDEGRKQMLRDFAPKYLQLRQDGKRWIAHIVIEREIKFGEPDYLYGVDIGARKYLLAAVAVPLKPDLPKLPNI
AIPSGEFWQAVERVEAEWRKWQRLRTGKKDKEGRVVLKKKRMAWRVLKRKRRMRREVAKNMIAEAVNTFINFIKRGNVNSGLAI
EQIKNLNLSPTLQDRKSRWRQRRWAYRLLLEMLRYKAEWEGIRVIEVNPTHTSQICPRCRKKDGKARQGNRFCCTKCHFQHNAD
FVAAYNIAMRGLRKLGMRGEIGWKVLTGKPRVLQ
(SEQ ID NO: 629)
>SRR6481359_megahit_k177_932521_3|M
[freshwater sediment metagenome]
MANRELVVVMQVQKVVKGKVVGLTHAKRQILDHEYEGLQRFLQGDSNVELYSANKQQAKRFYKTVKPEREYPLSIRKDLIRVER
RDTKIARYWARIPAKLRRGGVWVAVKPHCEITDDLEICESKLLRRNGEYFLHLAVKREVELNTSYSSVLAIDLGIRHVACSVDT
RSGETHFHGRELRRVRGHYFHLRRRLGEKKLLKVIKRIGARESRITNDQLHKIAKAIVDEAERLNALIAIGNPKGIRRNGKGRR
FNRKLNSWPFWKLRQYIEYKANWRGIAVVEVNEAYTSQRCWRCGTIGTRSGTHHGLFECPRCGLRENADRNGAFNIGRRALGQV
SKVGAVVSQPVTGAVPFSELGSVVQCPTPEATLFKGW
(SEQ ID NO: 609)
>3300012677|Ga0153928_1011778_2|M
[fungi-mycelium-attine ant fungus gardens]
MKITVKAKVTDDSKNKLGKIESEFQNYQVYLQSGCTTRVNLYSATKQQAQRALKKIKQPNPKKQYPVILRRDLVDIQQDIKFEG
VYWIKIPVYPNSINIRIKTSCKYDLTQHSIRESKILKIQNVWYIFITIEKQDERIIRADNVLAVDLGCKNIAVTVNTINTKPNF
YGAAIRGIRGFYFNLRRKLGEKKASDKIKLLKNIEFLQVNHELHKISKAIVEEAKRTNAVIVLGKLKGIRKNIKGSRRIRRLIN
NFPYYRLVQYIKYKAAWHSIKTLEISEADTSNTCFNCRTKDKKARKTQGLFQCGNCSIKTNADYNGAMNILQRGVGYFQL
(SEQ ID NO: 630)
>WP_121304574.1
[Haloarcula quadrata]
MKRNVSTTVRAKLHSLTNRKTDLLAREYEAFQTEVHGGDADLYSATDQQASKVQRQKYPNPGTEQPVVLRNDVFDVAYDEDTVL
SSWWVKVPVYDPEKGQGNSIWCPAHVPHKDEQLVREGNLRDSELVRSDGDWYVHLVVKRSVTVQDEYDDVLAIDMGARWVATCA
FLSDRKTTFYGEEVRRIREHYKQLRKSIGKAKPRQGQQVVERIGDAEARKVDDRLHKIARSIVEDAEERNAVIVVGDLGGIRKD
NDKGRYVNDKTHKMPFARLLNYIEYKAHGAGIDVQLVEEYDTSKTCNRCACEGVRTTQGRFECPECGLDDNADKNGALNIGKRA
LGKFLKPLSEAGAVLAQSETQVIVQRDDEPANLSVSVDSTPSGGTPRL
(SEQ ID NO: 631)
>SEJ25361.1
[Halohasta litchfieldiae tADL]
MKQTAEKTVVAKIFTNDLTQSKLDAINHEYEAFQRYIRGDEEADLYSATKQCADAYVDTDNLRDDHDYPWFIRNDVFDVGVDVE
QHDTDLTDWWLKLPVSQVWGGVNVPIQPHDEIPDEADVKDSKIVRVNGDYYAHLTVQQEVEVSEEYGGVIGVDFGVRWVATSVA
LPSRNTEFYGREIRRIRRHHHDLRTRLQEKGAYGTLQSVKVKEYRQVNDRLHKISRAIVEEAKECDALIVVGDLEGIQNQDLGA
EMNRRLHSMPHHTLKTYIEYKAMFAGIAVKSVNEYMTSQTCWRCGEQEATTRKGQGQHLCHECGLDDNADKNGATNIAKKGLGK
DIACPLSSLGAVCEPVLGPSGADQASATVCLRADLEAPASTKRTVR
(SEQ ID NO: 615)
>WP_121597521.1
[Halorubrum sp. Atlit-26R]
MQRNVSTTVRVKLHSLTNRKADLLAREYEAFQTAVHGGDADLYSATDQQASKVQRQKDPNPDTEQPVVLRNDVFDVAYDEDTVL
SSWWIKVPVYDPEQGRGNSIWCPAHVPYKDEQLVREGDVRDSELVRROGNWYVHLVVRRSVTVQDEYDDVLAIDMGARWVATCA
FLSDRKTAFYGEEVRRIREHYKQLRKSIGKAKPRQGQQVVKRIGDAEARKVDERLHKIARQIVEDAEERNAVIVVGDLGGIRKD
NDKGRYVNDKTHKMPFARLLNYIEYKAHDAGIDVQLTNEYDTSQTCNRCACKGVRETQGRFECPECGLDDNADKNGALNIGKRA
LGKFSKPLSEAGAVLAQPETQVIVPRDDEPANLSVSVGSTPSGGTPRL
(SEQ ID NO: 632)
>WP_006630662.1
[Halorubrum tebenquichense DSM 14210]
MQRNVSTTVRVKLHSLTNRKSDMLAREYEAFQREVHGGDADLYSATKQQASKVQQQKDPNPDTEQPVVLRNDVLDIAHDKDTVL
SSWWMKVPVYDPERGQGNSIWCPAHVPHKDETLVQEGDIRDSELVRRDGDWYVHLVVKRSVTIPDEYDDVLAIDMGARWVATCA
FLSDRDTTFYGEEVRRLREHYKQLRKSIGKAKPRQGQQVVERIGDAEARKVDDRLHKIARHIVEDAEERNTVIVVGDLGGICRD
NDKGRYINDKIHKMPFARLLNYIEYKAHGAGIDVVLVEEYDTSKTCNRCACEGVRETQGRFECPECGLDDNADKNGALNIGKRA
SGKFSKPLSEAGAVLAQPKTQVIVERDEEPANLSISVGSTPSGGTPRL
(SEQ ID NO: 633)
>DRR082460_megahit_k177_106880|P
[hot springs metagenome]
MRRRKPQQEGKEVQRTIICGVKFVAHEDEQLITESAKWYLEAKQKLLRYALQQEKVSISNPATVLKGLSVPAPPHSRLPDELSQ
AVSGILKALKKRRSEYLEKFQNWWQEVVRVSNKHGLQSFIPLKPKVEAFLNALANVKSWADPAWDGELQRRFEELKDMWAVVRQ
RDSNERRFRWRLHVPPLPKPPKTPELRLLGFDAGVRVSGGSRAQTLQIEQRNNDLFLRLLLARPGEKSKAGQYREVWLQLVLED
DLRKNWLLSPDIEAKFVRLRQIEDGKWQAHITVRKKVAKSEDFNIVYGIDIGLKRALLYCVPVATANAKPENWKELRLNKFIVP
AGEFWHRVIVEDERYRKWQRRFKGKKTEGIKGKRMAWRILKRLRKRRRKVTELLIHRVVNSLLENLMKASETAGFAIAIERLKD
LRNKPHLTSGKAQWKFHRWAYRFLLNTLRYKAEWEGVTVIEVNPAGTSQTCPRCGYKSRESRHDRLFRCRRCKFQHNADAVAAF
NIAKRVIEMKNGQVNQDAWKVLTGEWNVLKY
(SEQ ID NO: 634)
>DRR082460_megahit_k177_106880|M
[hot springs metagenome]
MQVRRRKPQQEGKEVQRTIICGVKFVAHEDEQLITESAKWYLEAKQKLLRYALQQEKVSISNPATVLKGLSVPAPPHSRLPDEL
SQAVSGILKALKKRRSEYLEKFQNWWQEVVRVSNKHGLQSFIPLKPKVEAFLNALANVKSWADPAWDGELQRRFEELKDMWAVV
RQRDSNERRFRWRLHVPPLPKPPKTPELRLLGFDAGVRVSGGSRAQTLQIEQRNNDLFLRLLLARPGEKSKAGQYREVWLQLVL
EDDLRKNWLLSPDIEAKFVRLRQIEDGKWQAHITVRKKVAKSEDFNIVYGIDIGLKRALLYCVPVATANAKPENWKELRLNKFI
VPAGEFWHRVIVEDERYRKWQRRFKGKKTEGIKGKRMAWRILKRLRKRRRKVTELLIHRVVNSLLENLMKASETAGFAIAIERL
KDLRNKPHLTSGKAQWKFHRWAYRFLLNTLRYKAEWEGVTVIEVNPAGTSQTCPRCGYKSRESRHDRLFRCRRCKFQHNADAVA
AFNIAKRVIEMKNGQVNQDAWKVLTGEWNVLKY
(SEQ ID NO: 635)
>OGCH01000195_3|M
[hot springs metagenome]
MKHLVSNAQVNEKNEARLTLKCGLEFENAEGEELVKRAAEWYCKARIFLLSYALKNNKTRVQKIASLLKSEGFPSPPHPRLIDL
LQRTITPAIKNMRRLRRRYPKTLRAWFDRVKKFAEEKGSDAAERLQPYVEDLLQLVKNLPINSPAWDTDAQEKWKELKKLWGKV
RESDWKKGIVWKFQIPNPKKPPSTPAFRCADSSNIFVTADYRMSGKNARNSYDMKTDSEENLWVLVRLDDVDGDVKVRKDVWIK
LCVDKSRYDLLRIGKITEIKILRNRDGRWEGRIVVKMNAGYNSPQVVVGVDVGASEHLIAAVGIPLDGSNNNFLLSVPASYFWK
RVEQAERLWRRWQRLYTGRTSEKKKAPILPRRRKAYQILKRNRNWRREVTKHCIFHAVKKFVQLLPPNSVVVVENLKDIPPNVW
KEDKDKRFRRWVYAFLLFTLKYKCQQRKIAVIAVSPHNTSQTCPRCGVVDPKSRGLWKDGELISRKHFCCTQCEFTHNADFVAA
HNIAVLGAKALGITLPESWRALRGEVQYVIPYQNMPKVRKSW
(SEQ ID NO: 636)
>SRR4027810_megahit_k177_26210_1|M
[hot springs metagenome]
MEKVILTITSGVEFLQPQDEQLVIKAAKWYTEARKALLYNALHKGEEGVKQAASTLSTLNFPPAPHSRLPDLLTRDVGGTLQAL
KERREGYAQDFSRWWEEICRVANEKGSQAVSVLKPHVNKLSSLIHQLSWNSPEWDEEAQEVFKELKQIWAVVRQKDHERLKIKW
RAEVPPVPRPPRTPKFQRLVFNADGRVSGGSRSNALQIEEREDGDLYLRLQLRDPERVAKKGSYQDVWLRLVIEDEERKQMLKN
FAPKYLQLRQDGKRWIAHIVIERENEFEVPQYVYGVDIGARKYLLAAVAIPLNPALPKPPNIAVPSSKFWQIVERVEAEWRKWQ
QLRTGKRDKEGRVVLKKRKMAWRVLKRKRRMRREVTKSMIAEAVNTFIKSLERPCAIVIEQIKNLHLSPTLQDRKSRWRQRRWA
YRFLLEMLRYKAEWEGIRVIEVNPAYTSQTCPRCGKRDRNARQGNLFQCTKCRFQHNADFVAAYNITVRGLMKLRTRGRIDWKI
LTGKPRVL
(SEQ ID NO: 637)
>SRR5247126_megahit_k177_220968_4|P
[hot springs metagenome]
MEKVVITITTGVEFLQPQDEQIVRKAAEWYTKAREALFDHALQQGKVKKAASTLRTLNLPMAPHSRLPDLLTRDVGGILKALKE
KRKGYLREFKRWWKEVCKVANEKGSQAVAVLKPHVDKLLNLVRQLPWNSPVWDGEAQEAFKNLKEAWAVVRQKDREQLKIKWRA
EVSPLRRPPRTPKFQRLVFNADGRVSGGSKSEALQIEEREDGDLYLRLQLRDPEGVVGGGAYQEVWLRLVVEDEERKQMLRDFA
PKYLQLRQDGKRWIAHIVIEREIKFGLKGIMWTAGDYLYGVDIGARKYLLAAVAVPLKPGLPKLLESQGDNVGIRHIAIPSGKF
WQAVERVEAEWRKWQRLRTGKKDKEGRVVLKKKRMAWRVLKRKRRMRREVAKNMLAKAVNTFILDFIKRNNVDIWLAIEQIKNL
NLSPTLQDRKSRWRQRRWAYRLLLEMLRYKAEWEGIRVIEVNPAHTSQICPRCGKKDGKARQGNRFCCTKCHFQHNADFVAADN
IAMRGLRKVGMRGEIGWKVLTGKPRVLQ
(SEQ ID NO: 638)
>3300027941|Ga0207719_100292_34|M
[lab enrichment-defined media-aerobic enrichment media]
MQQTVSTTVRVKLPSLTNRKADLLAREYEAFQTEVHGGDADLYSATKQQASKVRRQKDPNPDTEQPVVLRNDVFDVSYDEDTVL
SSWWVKVPVYDPERGRGNSIWCPAHVPHKDEQLVQEGDVRDSELVRRDGDWYIHLVVKRSVTVQDEYDDVLAIDMGARWVATCA
FLSDHKTTFYGEEVRRIREHYKQLRKSIGKAKPRQGQQVVERIGDAEARKVDDRLHKIARQIVGDAEERNAVIVVGDLGGIRKD
NDKGRYVNDKTHKMPFARLLNYIEYKAHDAGIDLQLVDEYDTSQTCNRCACEGVRATQGRFECPGCGLDDNADKNGALNIGKRA
LGKFSRPLSEAGAVLAQSETQVIVHRDEEPANLSVSVDSTPSGGTPRL
(SEQ ID NO: 639)
>3300027941|Ga0207719_100292_35|P
[lab enrichment-defined media-aerobic enrichment media]
MRVKLPSLTNRKADLLAREYEAFQTEVHGGDADLYSATKQQASKVRRQKDPNPDTEQPVVLRNDVFDVSYDEDTVLSSWWVKVP
VYDPERGRGNSIWCPAHVPHKDEQLVQEGDVRDSELVRRDGDWYIHLVVKRSVTVQDEYDDVLAIDMGARWVATCAFLSDHKTT
FYGEEVRRIREHYKQLRKSIGKAKPRQGQQVVERIGDAEARKVDDRLHKIARQIVGDAEERNAVIVVGDLGGIRKDNDKGRYVN
DKTHKMPFARLLNYIEYKAHDAGIDLQLVDEYDTSQTCNRCACEGVRATQGRFECPGCGLDDNADKNGALNIGKRALGKFSRPL
SEAGAVLAQSETQVIVHRDEEPANLSVSVDSTPSGGTPRL
(SEQ ID NO: 640)
>SRR6484323_megahit_k177_106899_4|P
[landfill metagenome]
MALKTLTFWPLEIPPEHKRIFDDIRKQLGNAQREMVKAWLKLALAAEPYGITPGEQAGRVLFGETDYSNGLLKSLAYTDARDSF
KEQWKGVLKGDATSVSFPDEASGVVLLVGSGQATVEKIDGEWWVTRLLVFGGRTAEDRSRNDQFRWQLKGVSRFGGHYEKSVMD
RAERICQVRVLPARKDRGKYVVQVTVEVPDEQIERTAIPVCAGIDLGINCPVVLSIPDKGFVRFMGRERDEYPRLWEKLREYED
RKRTLNRAGKRRAARDLRPRLTNIRKYINEAISKDVADTCRAMRVTTLRMENLKGLSFHKSGTGKLRHWPRYHLQERIEQKCGE
VGIEVERIKPAGTSQTCSMCGHRDKGNRNGSDFICLACGYRQHADLNAANNIARGMQEFGPCVQSSASDNTIELRFDGAGQEPA
LGRAMRLFA
(SEQ ID NO: 641)
>SRR6484325_megahit_k177_1345066_6|P
[landfill metagenome]
MALKTLTFWPLEIPPEHKRIFDDIRKQLGNAQREMVKAWLKLALAAEPYGITPGEQAGRVLFGETDYSNGLLKSLAYTDARDSF
KEQWKGVLKGDATSVSFPDEASGVVLLVGSGQATVEKIDGEWWVTRLLVFGGRTAEDRSRNDQFRWQLKGVSRFGGHYEKSVMD
RAERICQVRVLPARKDRGKYVVQVTVEVPDEQIERTAIPVCAGIDLGINCPVVLSIPDKGFVRFMGRERDEYPRLWEKLREYED
RKRTLNRAGKRRAARDLRPRLTNIRKYINEAISKDVADTCRAMRVTTLRMENLKGLSFHKSGTGKLRHWPRYHLQERIEQKCGE
VGIEVERIKPAGTSQTCSMCGHRDKGNRNGSDFICLACGYRQHADLNAANNIARGMQEFGPCVQSSASDNTIELRFDGAGQEPA
LGRAMRLFA
(SEQ ID NO: 641)
>SRR6484787_megahit_k177_1514834_8|M
[landfill metagenome]
MDTAANETTPKALCFWLGALSDAEFKLLHELSRQLARCHATFVQAALEYQFAADRGSAPEVIAQTGPNKGKPSSDPRETYAKRA
FQAEFAKAPFMRKFGDTYCRQVSGKDFKRQWGLIRTGQKSSVSFGPGSHANIDILTGRQAAIEHDADGWWLCGLGITLEDRKER
PGRRWALIPQTNGGAAVKAKQAARMLRQLEEAVRTPQVRLVWRDGKRGGSKGWEAQVVCHMPVKVAKPAEPVVCGIDVGMRCLL
VASIPERRKARFIGGNTFGKLWHEIERHGKRRSVLNKAHKRHAAAAKSDKVSRIRRHACELASRQLIDWCVYHHVSTIRMEDLS
GIRDRCSEDGATEQQRTWNKRLAHWPWYTLQQRIEQKAAAVNIAVEKINPHLTSQTCSACGHVDKGNREGAQFRCLSCGFECHA
DLNAANNIAGRDPATDFDTPDRAAVRSDGPKSRPQAGRASRLVAASTP
(SEQ ID NO: 642)
>SRR8542065_megahit_k177_1115558_2|M
[landfill metagenome]
MALKTLTFWPLEIPPEHKRIFDDIRKQLGNAQREMVKAWLKLALAAEPYGITPGEQAGRVLFGETDYSNGLLKSLAYTDARDSF
KEQWKGVLKGDATSVSFPDEASGVVLLVGSGQATVEKIDGEWWVTRLLVFGGRTAEDRSRNDQFRWQLKGVSRFGGHYEKSVMD
RAERICQVRVLPARKDRGKYVVQVTVEVPDEQIERTAIPVCAGIDLGINCPVVLSIPDKGFVRFMGRERDEYPRLWEKLREYED
RKRTLNRAGKRRAARDLRPRLTNIRKYINEAISKDVADTCRAMRVTTLRMENLKGLSFHKSGTGKLRHWPRYHLQERIEQKCGE
VGIEVERIKPAGTSQTCSMCGHRDKGNRNGSDFICLACGYRQHADLNAANNIARGMQEFGPCVQSSASDNTIELRFDGAGQEPA
LGRAMRLFA
(SEQ ID NO: 641)
>SRR8542065_megahit_kl77_821416_8|M
[landfill metagenome]
MLGQVKTVKFHITGVTRDQGEALTGSLRALGAAARTAVKTALMEVADKDLHGVKDAYWQGVQVRAEQSAREAFKETGYSPAILN
EYWNAFGFTGFKIRWSQVRKGERTSIPFPGDAPFLQFTNGATIQVAETEDGYCIRRIRIYGLVGNKPDTRNEVEWALKPVGRGR
HAAWGIEQLRRANKICAVRIHKAERGWIAAVSVRIQAEAVAASRPERWAGIDLGLNSPAVLSVPDANFSRFYGRDLYSGLWRSL
DEYEARKRELVRAGKKQAARDLDDRISAKRKHINELISRQIVDDCRRLRVTGIRLEDLKGIQQFATGRLKHWPRHNLALRIEQK
AAEVGIETEMVRPAYTSLTCSHCGHMEKDNRSRENVSLFLCRRCGFSRHADLNGANNIARKLERFGIEEPNLSVFERAEQPRLH
RLGATTGPEHLEGRLTEAAT
(SEQ ID NO: 643)
>FZPS01000148_2153|M
[metagenome]
MIKTATFYIADMPQEDKRLCERLCAELGAAGATMVREWYRACDEVTGERINWPEVQKRGVQVGRQAFAERGYRAELVNDLQRAE
FFARFKMEFKKIQAGERASLPFPGSAPFIFLRMDPGKEKATLVQEDGTWYLRDPHFYPGGGRNEDNKREWRLKDVGRNGWGYAI
LAEAEKAACIRIMPDRKKRGSWVVKITVHLPDAALRKEVERQEVWAGIDLGLNCPAVLSIPDHPDGGFVRFFGNDEYARLWQRL
KEYEDRKRRLNRAGKRRAARDLRAKITGVRQHINELISREIIDLCIAMRVTGLRMEDLKGLGADGSGKLKFWPRFHLVTRIEQK
AHEAGLEFVKIKPAGTSQTCSACGYRDKDNRNGSDFTCKRCGFSRHADVNAANNIARGMEEFSLPTGATAPNKAQRLVIAS
(SEQ ID NO: 644)
>WP_005554257.1
[Natronococcus amylolyticus DSM 10524]
MHREVTTTVRVKLHSLTERKARLIEREYTAFQDAVHGGDASLYSATKQQAGKVRSNKNPREDTDQPVVLRNDCITIEHDEDTVL
SSWWFKLPIYNPKRERGDSIWVPVHVPEKDTHLLTDEYIRDSELVHRDGEWYVHLVCKRSVAVADEYDDVLAVDMGAKWIAVST
FLSDRDTQFHGAEVRRVREHYKQLRKSIGKAKVRQGAQVIERIGDKESWTVEHELHQVANELIARARERNAVIVFGDMTGLRFD
NDEGRYVNDKTHKMPYAKLANILTYKSHLDGRECIPVSEYDTSVTCWRCGSQNTSRGAQGRVECCDCGLDDNADKNGASNIGKR
AVGKDIQSPLSTVGAAVAQPETQVVLDGTSGEMEPANSPKDVGLTLSEGSPRL
(SEQ ID NO: 645)
>SRR7004341_megahit_k177_2665443_5|P
[peat metagenome]
MSLVKVKKCYYCKVIEDLTNTKLVALQQEYDNLQHYLQTKEDLGLYSANKQQANRFYKVIKRGKKYPLSIRNDLIRIEHKPSTI
AEYWIRIPVKSVKGGLWIGLIKPYEPIPTDAKICESKLYKKONSWFLDLVVEKDIPEKLQYQNVIGIDMGIRHIATSVELANGL
TKFYGKDLNRVRGHYFWLRRKLGIKKAIDTIKKIGDHEKRIANDIIHNISRDIVNQAIESNAMIVLGDIKHLRRRKKNTRGKKF
NRKLAGFQYCKLTQYITYKAALAGIKVIQVSQARTSQYCRKCYQKGVRKIQGLFTCAKCGEENADRNAAFNIIYRALGYISKVG
VTVNIPNARTFASVDRNAMMTREATCF
(SEQ ID NO: 646)
>SRR8526178_megahit_k177_763700_3|P
[salt lake metagenome]
MSLKTLTFWPIGMSAKYRRIFDNIRKQLGAAQREMVKAWLRLALAEDAYGIDPGKRAGREVFGDNEYSNDLLNNLAYADAHENF
KQQWKRVRSGNATSVSFSDAAANVLFLMPPSGGHHATVEHIDGNWWITRLKVFGGCTKADRERNDQFRWQLKGVSRFGGKYEKD
LMDGAQRICQVRVTPSRKDPSKYVVQVTVEVPDLQTVGARTPVCAGIDLGINCPVVLSIPDKGFVQFMGRERDEYPRLWEKLRE
YEDRKRRLNRAGKRRAARDLRPRITNVRKYINEAISKDVADTCRALGVTHLRMEDLKGLSRHKSMTGKLRYWPRYHLQERIERK
CCEVGIEVERIKPAGTSQTCSVCGHREKANRNGAQFVCIECGYQQHADLNAANNIARGMQTFGPCAKSSASDDAIGLRFDSEGQ
ESALGQAKRLFA
(SEQ ID NO: 616)
>OVXO01016275_2|M
[sediment metagenome]
MLVRKVIKAKIMDEANSRKLKALEKEYNNFQRALRGEDVKLYSATRQQAERLLRKIRKQRGKLKQKEYPLILRNDVYDVRITNN
KLSKYWIKIPVYGVRGGIKLPIKPHCEIDASWKFKEAKVIRKENGWFVHITVEKEIEIKKEYENVIAIDLGIRNIATVVSTADG
KPRFYGKELRRIRGHYFHLRRRLAKLKKFKAIKKIGNKERRVVDDLLHKISREIVNRAKEENAVIVLGDLKRIRKQNRGRKFNR
KLNTFPYYRLSKFIEYKALWEGIAVIKVNEANTSKICSRCGSQGLRRNGKFVCSKCGVELNADYNGALNILKRALGYMSKAGAD
LTQPFQSHFGLILTMKKRYGRD
(SEQ ID NO: 647)
>SRR7067823_megahit_k177_107253_1|P
[sediment metagenome]
MEKVILTITSGVEFLQPQDEQLVIKAAKWYTEARKALLYNALQKGEEGVKQAASTLSTLNFPPAPHSRLPDLLTRDVGGTLQAL
KERREGYAQDFSRWWEEICRVANEKGSQAVSVLKPHVNKLSSLIHQLSWNSPEWDEEAQEVFKELKQIWAVVRQKDHERLKIKW
RAEVPPVPRPPRTPKFQRLVFNADGRVSGGSRSNALQIEEREDGDLYLRLQLRDPERVAKKGSYQDVWLRLVIEDEERKQMLKN
FAPKYLQLRQDGKRWIAHIVIERENEFEVPQYVYGVDIGARKYLLAAVAIPLNPALPKPPNIAVPSSKFWQIVERVEAEWRKWQ
QLRTGKRDKEGRVVLKKRKMAWRVLKRKRRMRREVTKSMIAEAVNTFIKSLERPCAIVIEQIKNLHLSPTLQDRKSRWRQRRWA
YRFLLEMLRYKAEWEGIRVIEVNPAYTSQTCPRCGERDRNARQWNLFRCTKCRFQHNADFVAAYNITVRGLMKLRTRGRIDWKI
LTGKPRVL
(SEQ ID NO: 648)
>SRR7067986_megahit_k177_69094_7|P
[sediment metagenome]
MEKVILTVTSGVEFLQPQDEQLVIKAAKWYTEARKALLYNALQKGEEGVKQAASTLSTLNFPPAPHSRLPDLLTRDVGGTLQAL
KERREGYAQDFSRWWEEICRVANEKGSQAVSVLKPHVNKLSSLIHRLSWNSPEWDEEAQEVFKELKQIWGVVKQKDHERLKIKW
CAEVPPVPRPPRTPKFQRLVFNADGRVSGGSRSNALQIEEREDGDLYLRLQLRDPERVAKKGSYQDVWLRLVIEDEERKQMLKN
FAPKYLQLRQDGKRWIAHIVIERENEFEVPQYVYGVDIGARKYLLAAVAIPLNPALPKPPNIAVPSSKFWQIVERVEAEWRKWQ
QLRTGKRDKEGRVVLKKRKMAWRVLKRKRRMRREVTKSMIAEAVNTFIKSLERPCAIVIEQIKNLHLSPTLQDRKSRWRQRRWA
YRFLLEMLRYKAEWEGIRVIEVNPAYTSQTCPRCGERDRNARQGNLFRCTKCRFQHNADFVAAYNITVRGLMKLRTRGRIDWKI
LTGKPRVL
(SEQ ID NO: 649)
>SRR8554444_megahit_k177_504614_2|M
[sediment metagenome]
MVAVKTIKAKIIAPTRRKAEILEKEYQGFQDILHGQQAEIYSRTRDQALRVLRRIKAPKDRHYPLILHRASIRLERRDTKIAQY
WFRFPCHGVRGGIWLAIKPHCQIPEGCSLRETKLIKRNNAWFLYIIIKKEVPEPVINPDRIVAVDLGERYLATVCGGEGIRPQF
LGKEARGIRRHYAWLRRRLGELKLLRTIKKVGNTERRKINTICHQISRKIVDLAKQTGSTIVLGDLKGIRQRARGRRMNRIVSG
MPYYKLTQFIKYKAAWESVPVLIVSERDTSKTCHRCGAIGTRPYQGLFLCQACGLRYSADLNGAKNIMKRAREYISLAGAAFSQ
PMTRALAGNPLMETG
(SEQ ID NO: 650)
>SRR8554446_megahit_k177_83048_1|M
[sediment metagenome]
MKKVVITITTGVEFLQPQDEQIVRKAAEWYTKAREALFAHALQQQQGKVEKAASTLRTLNFPMAPHSRLPDLLTRDVGGILKAL
KEKREGYLGEFKRWWEEVCRVANEKGSQAVAALKTHVDKLLNLVHQLPWNSPVWDGEAQEAFKNLKEAWAVVRQKDREQLKIRW
RAEVSPLRRPPRTPKFQRLVFNADGRVSGGSKSEALQIEEKEDGDLYLRLQLRDPEGIVGGGAYQEVWLRLVVEDEERKQMLRD
FAPKYLQLRQDGERWIAHIVIEREIKFGKPDYLYGVDIGARKYLLAAVAVPLKPDLPKLPNIAIPSGKFWQAVERVEAEWRKWQ
RLRTGKKDKEGRVVLKKRTAWRVLKRKRRMRREVAKNMIAEAVNTFINFIKGDNVDIRLWLAIEQIKNLNLSPAFQDRKSRWRQ
RRWAYRLLLEMLRYKAEWEGIRVIEVNPAHTSQICPRCGKKDGKARQGNRFCCTKCKFQHNADFVAAYNIAVRALKKLGMREEI
GWKVLTGKPKVL
(SEQ ID NO: 625)
>SRR6201998_megahit_k177_1568738_2|M
[soil metagenome]
MKITVKAKVTDDSKNKLEKIESEFQNYQVYLQSGCTAIVNLYSATKQQTQRALKKIKQPNQKKQYPVILRRDLIDIQKDIKFKG
VYWMRIPVYPNSINIRIKTSCKYDLTEYSIRECKILKIRNEWYIFITIEKQDEPIIPPDNVLAVDLGCKNIAVTVNTINTKPNF
YGAALRGIRGFYFNLRRKLGEKKASNKIKSLKNIEFLQVNHELHKISKAIVEEAKRTNAVIVLGKLKGIRKNIKGSRRMRRLIN
NFPYYRLVQYIKYKAAWRSIRALEISEADTSNTCFNCRTKDKKARKTQGLFQCSNCSIRTNADYNGAMNILQRGVGILSTLGGF
LTYPEPSVIIDRNKMITKEPQML
(SEQ ID NO: 651)
>SRR8554511_megahit_k177_4248910_4|P
[soil metagenome]
MIKTATFWLCEVTSDQRAVLVDISKQLGAAHRAMVCEWLRLAMAGEPYGENAGKQKAREVFADTPYSNGLVNNYSHADAHPRFK
KQWEAVLKGERSSVAFPGRAPFIYLGAPEQVSVELLDGGWHIVDPRLYIGDSKDNGRSITWQEGRSRNRSIAWRLDPVDNRRTG
WCLGLLRDAECVSCVRLMKSDRRPGRWLAKISVELAEAASARDKEEVELCAGIDLGLNCPVVLSVPDKGLLRFFGREGDMYPRL
WQKLRQYEDRKRAFNRAGHKREARDLRMNLTNVRQYINECVSKAVVDYCLANRVTKLRLENLKGLGVGATGKLKHWPRYHLQQR
IEQKGAAAGLEVEYVKAAGTSQTCSVCGHRHRDNRQRSQFECLACGYTAHADVNAANNIARNLETFGPVTGSRSAQEAPVGLRF
DWEGREPGLRGKSSRLQLDLGTQVSRSAEGGVINAAT
(SEQ ID NO: 652)
>SRR8554511_megahit_k177_4248910_4|P
[soil metagenome]
MDISKQLGAAHRAMVCEWLRLAMAGEPYGENAGKQKAREVFADTPYSNGLVNNYSHADAHPRFKKQWEAVLKGERSSVAFPGRA
PFIYLGAPEQVSVELLDGGWHIVDPRLYIGDSKDNGRSITWQEGRSRNRSIAWRLDPVDNRRTGWCLGLLRDAECVSCVRLMKS
DRRPGRWLAKISVELAEAASARDKEEVELCAGIDLGLNCPVVLSVPDKGLLRFFGREGDMYPRLWQKLRQYEDRKRAFNRAGHK
REARDLRMNLTNVRQYINECVSKAVVDYCLANRVTKLRLENLKGLGVGATGKLKHWPRYHLQQRIEQKGAAAGLEVEYVKAAGT
SQTCSVCGHRHRDNRQRSQFECLACGYTAHADVNAANNIARNLETFGPVTGSRSAQEAPVGLRFDWEGREPGLRGKSSRLQLDL
GTQVSRSAEGGVINAAT
(SEQ ID NO: 653)
>3300014204|Ga0172381_10015437_8|M
[solid waste-landfill-landfill leachate]
MDTAANETTPKALCFWLGALSDAEFKLLHELSRQLARCHATFVQAALEYQFAADRGSAPEVIAQTGPNKGKPSSDPRETYAKRA
FQAEFAKAPFMRKFGDTYCRQVSGKDFKRQWGLIRTGQKSSVSFGPGSHANIDILTGRQAAIEHDADGWWLCGLGITLEDRKER
PGRRWALIPQTNGGAAVKAKQAARMLRQLEEAVRTPQVRLVWRDGKRGGSKGWEAQVVCHMPVKVAKPAEPVVCGIDVGMRCLL
VASIPERRKARFIGGNTFGKLWHEIERHGKRRSVLNKAHKRHAAAAKSDKVSRIRRHACELASRQLIDWCVYHHVSTIRMEDLS
GIRDRCSEDGATEQQRTWNKRLAHWPWYTLQQRIEQKAAAVNIAVEKINPHLTSQTCSACGHVDKGNREGAQFRCLSCGFECHA
DLNAANNIAGRDPATDFDTPDRAAVRSDGPKSRPQAGRASRLVAASTP
(SEQ ID NO: 642)
>3300014205|Ga0172380_10102486_2|M
[solid waste-landfill-landfill leachate]
MALKTLTFWPLEIPPEHKRIFDDIRKQLGNAQREMVKAWLKLALAAEPYGITPGEQAGRVLFGETDYSNGLLKSLAYTDARDSF
KEQWKGVLKGDATSVSFPDEASGVVLLVGSGQATVEKIDGEWWVTRLLVFGGRTAEDRSRNDQFRWQLKGVSRFGGHYEKSVMD
RAERICQVRVLPARKDRGKYVVQVTVEVPDEQIERTAIPVCAGIDLGINCPVVLSIPDKGFVRFMGRERDEYPRLWEKLREYED
RKRTLNRAGKRRAARDLRPRLTNIRKYINEAISKDVADTCRAMRVTTLRMENLKGLSFHKSGTGKLRHWPRYHLQERIEQKCGE
VGIEVERIKPAGTSQTCSMCGHRDKGNRNGSDFICLACGYRQHADLNAANNIARGMQEFGPCVQSSASDNTIELRFDGAGQEPA
LGRAMRLFA
(SEQ ID NO: 641)
>3300031566|Ga0307378_10048523_2|M
[terrestrial-soil]
MSLKTVGLYLAEMPQEDKVVCKAICRDLGRAGARMVREWYRACDEVAPGEKIPWGEVQTRGVVVGKATVQEAGLRPELANEMQR
TEFFARFKTEFGKILRGEKASLPFPGDAPFIYLRLDPGNAAATIEKREGVWYLRDPHFYPGGGRNQDNKREWRLKGRSRDGWEY
RWLEAAEKLACVRIKPDHKKRGAWVALITLHVPQVDDRPGSPEAVWAGVDLGLNSPAVLSIPDHPEGGFVRFFGRDLYLRMWDR
LDQYEERKARLNRAGKRRAARDLRAKITGIRQHINELISREIVDLCRRLRVTGIRMEDLRGIQDAATGKLKHWPRYHLMMRIQQ
KAGEAGLAFELVRAAGTSQTCSACGYREKGNREGALFHCLRCGFERHADVNAANNIARGMEEFDLPTGAQAMRPARRLELVAG
(SEQ ID NO: 654)
>SRR6837575_megahit_k177_854481_7|M
[wastewater metagenome]
MTTDKQTVTKTLRFWLTDLSKEDFDLLHELSRELARCHRLFVQASLEYAFAGGTNTTERLRLARRVYQEEFGKSRFVKRFGNTY
TGEIADKDFKRQMGLIQRGQKSSVSFGPGSHANIDLLTEGLQCTLVKEGDGWYITGAALTLDEDKATRAARKWGIIPQTSGGAA
VKAKQHARTMRQIEQAERTSRVRLVWRDGKKGGRKGWEAQVVCRMPVTASKPSEPTVCGIDVGMHCLLVASIPTKDKATFIGGN
TFGELWHEIERHCERRTILNKAHKRHAAAAQSDKISRIRKHGCELASRQLIDWCMYHHVTTIRLEDLSGIRDRCSEDENSEKAR
TWNRRLSHWPWYQLQQRIEQKADAYGITVEKVNPHLTSQTCSSCGYANPANREGTQFKCQRCGFERHADLNAANNIARREPGVD
FDAPNTPGRAAVLSDGPKSRPKAGRSGRLVLSDNPVTPRPDTLQLDMVL
(SEQ ID NO: 655)
>SRR6837576_megahit_k177_1219670_1|P
[wastewater metagenome]
MTTDKQTVTKTLRFWLTDLSKEDFDLLHELSRELARCHRLFVQASLEYAFAGGTNTTERLRLARRVYQEEFGKSRFVKRFGNTY
TGEIADKDFKRQMGLIQRGQKSSVSFGPGSHANIDLLTEGLQCTLVKEGDGWYITGAALTLDEDKATRAARKWGIIPQTSGGAA
VKAKQHARTMRQIEQAERTSRVRLVWRDGKKGGRKGWEAQVVCRMPVTASKPSEPTVCGIDVGMHCLLVASIPTKDKATFIGGN
TFGELWHEIERHCERRTILNKAHKRHAAAAQSDKISRIRKHGCELASRQLIDWCMYHHVTTIRLEDLSGIRDRCSEDENSEKAR
TWNRRLSHWPWYQLQQRIEQKADAYGITVEKVNPHLTSQTCSSCGYANPANREGTQFKCQRCGFERHADLNAANNIARREPGVD
FDAPNTPGRAAVLSDGPKSRPKAGRSGRLVLSDNPVTPRPDTLQLDMVL
(SEQ ID NO: 655)
>3300009716|Ga0116191_1022210_3|P
[wastewater-anaerobic digestor-anaerobic digestor sludge]
MIKTVTFYIAEMPREDKRLCDRLCIDLGAAGARMVREWFRACDETPPGAAIDWPEVQRRGVAVGKAMVEAAGYRTELGNDLARA
EFFARFKMEFKKVLKGERASLPFPGRAPFIFLRMDPGHETAIIEQRDDAWYMRNPRFYPGGDSNEANRREWRLKPVDRKGWAEN
ILEAAEKFACVRIMPDRKKPGSWVVKITVHLPDALERKLVEEHECWAGIDLGINCPAVLSIPDRDKGGFVRFFGMDKYTALWAK
LNRYEERKRALNRVGQQHAARDLRAKITGLRQYINEQISREIIDLCLRMHVTGIRMEDLKGLRTEGTGKLKYWPRFHLTTRIEQ
KAREVGLAFEQIRAAGTSQTCSVCGHRHRDNRHGSDFLCLRCGFARHADVNAANNIARGMQDFDLPAGSAAPGRALRLELSAQ
(SEQ ID NO: 606)

TABLE 9
Nucleotide sequences o f Representative
CLUST. 196682 Direct Repeats

| CLUST. 196682 all | |
|---|---|
| Effector Protein | Direct Repeat |
| Accession | Nucleotide Sequence |
| 3300025638\|Ga0208198_ | CTCTCCACGCGCGCGCGG |
| 1021643_2\|P | GATGCGGG |
| (SEQ ID NO: 601) | (SEQ ID NO: 701) |
| 330005300\|Ga0072500_ | GCCTGCTGTCCACACTATC |
| 136962_4\|M | CCCCAAAAAC |
| (SEQ ID NO: 602) | (SEQ ID NO: 702) |
| CAAACJ010042499_2\|P | GTGCTCTCCACGCGCGCGC |
| (SEQ ID NO: 603) | GGGATGCGG |
| | (SEQ ID NO: 703) |
| SRR5007116_megahit_ | GGTCTCTCCACGCGCGCGC |
| k177_300528_2\|M | GGGATGCGGG |
| (SEQ ID NO: 604) | (SEQ ID NO: 704) |
| SRR5007140_megahit_ | GTGCTCTCCACGCGCGCGC |
| k177_707372_2\|P | GGGATGCGGG |
| (SEQ ID NO: 603) | (SEQ ID NO: 705) |
| SRR5007457_megahit_ | GTGCTCTCCACGCGCGCGC |
| k177_513017_2\|M | GGGATGCGGG |
| (SEQ ID NO: 605) | (SEQ ID NO: 705) |
| SRR5007461_megahit_ | GTGCGGCCCACGCGCGCGC |
| k177_311051_7\|P | GGGGCAGAGG |
| (SEQ ID NO: 606) | (SEQ ID NO: 706) |
| 3300027896\|Ga0209777_ | TGGTGACCATGTTTTTGTTGAA |
| 10000273_30\|P | (SEQ ID NO: 707) |
| (SEQ ID NO: 607) | |
| 3300027896\|Ga0209777_ | TGGTGACCATGTTTTTGTTGAA |
| 10000273_32\|M | (SEQ ID NO: 707) |
| (SEQ ID NO: 608) | |
| 3300013127\|Ga0172365_ | CCAGTCCAAGTTTCGATGAG |
| 10030480_ | (SEQ ID NO: 708) |
| 1\|M | |
| (SEQ ID NO: 609) | |
| 3300013128\|Ga0172366_ | CCAGTCCAAGTTTCGATGAG |
| 10002984_ | (SEQ ID NO: 708) |
| 1\|M | |
| (SEQ ID NO: 610) | |
| 3300013129\|Ga0172364_ | CCAGTCCAAGTTTCGATGAG |
| 10030775_ | (SEQ ID NO: 708) |
| 1\|P | |
| (SEQ ID NO: 609) | |
| 3300013130\|Ga0172363_ | CCAGTCCAAGTTTCGATGAG |
| 10005240_ | (SEQ ID NO: 708) |
| 1\|P | |
| (SEQ ID NO: 609) | |
| 3300013133\|Ga0172362_ | CCAGTCCAAGTTTCGATGAG |
| 10039269_3\|M | (SEQ ID NO: 708) |
| (SEQ ID NO: 609) | |
| 3300032070\|Ga0315279_ | GGAAACAAAATAACAAACAA |
| 10000130_51\|M | (SEQ ID NO: 709) |
| (SEQ ID NO: 611) | |
| 3300032118\|Ga0315277_ | TATAAGGTGTTTTGAAAATGA |
| 10001250_38\|M | (SEQ ID NO: 710) |
| (SEQ ID NO: 612) | |
| 3300024429\|Ga0209991_ | GAGAAGGCAAAAAGAGAAGC |
| 10029076_1\|P | (SEQ ID NO: 711) |
| (SEQ ID NO: 613) | |
| 3300014886\|Ga0180300_ | TTTCAATTCCCATTATATGG |
| 10007429_2\|M | GATTTCTCTTTGAAACC |
| (SEQ ID NO: 614) | (SEQ ID NO: 712) |
| 330005935\|Ga0075125_ | GTTGTCTCCACGCGCGCGAG |
| 10033396_1\|P | GGCGGTTTG |
| | (SEQ ID NO: 714) |
| (SEQ ID NO: 616) | |
| 3300025736\|Ga0207997_ | GTTGTCTCCACGCGCGCGAG |
| 1027507_2\|M | GGCGGTTTG |
| (SEQ ID NO: 616) | (SEQ ID NO: 714) |
| 3300007203\|Ga0099832_ | CTTTCAATCCCACAATGGTG |
| 1115789_2\|M | CGATTGCTGCG |
| (SEQ ID NO: 617) | (SEQ ID NO: 715) |
| 3300000083\|Ga0072500_ | AGTGCGGGGGGAACCTAGGA |
| 119562_4\|M | GGGCAGTGGGC |
| (SEQ ID NO: 618) | (SEQ ID NO: 716) |
| 3300008000\|Ga0105162_ | GTTCGCGAGAGACTTTGTGA |
| 1004089_4\|M | ATAACAAGC |
| (SEQ ID NO: 619) | (SEQ ID NO: 717) |
| 3300008000\|Ga0105162_ | GTTCGCGAGAGACTTTGTGA |
| 1004089_4\|P | ATAACAAGC |
| (SEQ ID NO: 620) | (SEQ ID NO: 717) |
| 3300022544\|Ga0212120_ | GTTCGCGAGAGACTTTGTGA |
| 1002806_5\|M | ATAACAAGC |
| (SEQ ID NO: 619) | (SEQ ID NO: 717) |
| 3300022544\|Ga0212120_ | GTTCGCGAGAGACTTTGTGA |
| 1002806_5\|P | ATAACAAGC |
| (SEQ ID NO: 620) | (SEQ ID NO: 717) |
| 3300025063\|Ga0209493_ | GCCTGCTGTCCACACTATCC |
| 1003385_3\|M | CCCAAAAAC |
| (SEQ ID NO: 621) | (SEQ ID NO: 702) |
| 3300025090\|Ga0209080_ | GTTCGCGAGAGACTTTGTGA |
| 1004127_5\|M | ATAACAAGC |
| (SEQ ID NO: 622) | (SEQ ID NO: 717) |
| 3300025440\|Ga0209741_ | GCCTGATGTCCACATTATCC |
| 1005495_ | CCTTAAGAC |
| 1\|M | (SEQ ID NO: 718) |
| (SEQ ID NO: 623) | |
| 3300028675\|Ga0272445_ | GCCTGATGTCCACATTATCC |
| 1001731_ | CCTTAAGAC |
| 11\|M | (SEQ ID NO: 718) |
| (SEQ ID NO: 624) | |
| 3300029977\|Ga0272449_ | GCCTGATGTCCACATTATCC |
| 1037372_ | CCTTAAGACC |
| 1\|P | (SEQ ID NO: 719) |
| (SEQ ID NO: 625) | |
| SRR1562008_megahit_ | CGTGCGATCCACGCGCGCGC |
| k177_216982_5\|P | GGGGCAGAGG |
| (SEQ ID NO: 626) | (SEQ ID NO: 720) |
| UOPD01011681_4\|M | CGTGCGATCCACGCGCGCGC |
| (SEQ ID NO: 626) | GGGGCAGAGG |
| | (SEQ ID NO: 720) |
| 2645728127\|Ga0097870_ | GCCTGCTGTCCACACTATCC |
| 126_5\|M | CCCAAAAAC |
| (SEQ ID NO: 627) | (SEQ ID NO: 702) |
| SRR5272259_megahit_ | TGGTGACCATGTTTTTGTTG |
| k177_4486292_ | AA |
| 121\|P | (SEQ ID NO: 707) |
| (SEQ ID NO: 607) | |
| SRR5272259_megahit_ | TGGTGACCATGTTTTTGTTG |
| k177_4486292_ | AA |
| 118\|M | (SEQ ID NO: 707) |
| (SEQ ID NO: 608) | |
| SRR5273149_megahit_ | GCCTGCTGTCCACATTATCC |
| k177_25824_ | CCTTAAGAC |
| 1\|M | (SEQ ID NO: 721) |
| (SEQ ID NO: 628) | |
| SRR5273182_megahit_ | GCCTGCTGTCCACATTATCC |
| kl77_57442_ | CCTTAAGAC |
| 1\|M | (SEQ ID NO: 721) |
| (SEQ ID NO: 628) | |
| SRR5273183_megahit_ | GCCTGCTGTCCACATTATCC |
| k177_82677_3\|M | CCTTAAGAC |
| (SEQ ID NO: 629) | (SEQ ID NO: 721) |
| SRR6481359_megahit_ | CCAGTCCAAGTTTCGATGAG |
| k177_932521_3\|M | |
| (SEQ ID NO: 609) | (SEQ ID NO: 708) |
| 3300012677\|Ga0153928_ | ATATTATGATAAAGCATTGG |
| 1011778_2\|M | CTATAGATCCAA |
| (SEQ ID NO: 630) | (SEQ ID NO: 722) |
| WP_121304574_1 | CAACAGAGTCACCAACAGC |
| (SEQ ID NO: 631) | (SEQ ID NO: 723) |
| SEJ25361_1 | AGTAATTACTGAGTCATTAC |
| (SEQ ID NO: 615) | TC |
| | (SEQ ID NO: 724) |
| WP_121597521_1 | GCAGCTGGGGCTTTGGCGGT |
| (SEQ ID NO: 632) | GTT |
| | (SEQ ID NO: 725) |
| WP_006630662_1 | ACACTTCGATAGAGGGGTGT |
| (SEQ ID NO: 633) | |
| | (SEQ ID NO: 726) |
| DRR082460_megahit_ | AGCTTACTATCCACAAAGTC |
| k177_106880\|P | TTCCGCGAAC |
| (SEQ ID NO: 634) | (SEQ ID NO: 727) |
| DRR082460_megahit_ | AGCTTACTATCCACAAAGTC |
| k177_106880\|M | TTCCGCGAAC |
| (SEQ ID NO: 635) | (SEQ ID NO: 727) |
| OGCHO1000195_3\|M | AGTGCGGGGGGAACCTAGGA |
| (SEQ ID NO: 636) | GGGCAGTGGGC |
| | (SEQ ID NO: 716) |
| SRR4027810_megahit_ | GCCTGCTGTCCACACTATCC |
| k177_26210_1\|M | CCCAAAAAC |
| (SEQ ID NO: 637) | (SEQ ID NO: 702) |
| SRR5247126_megahit_ | GCCTGATGTCCACATTATCC |
| k177_220968_4\|P | CCTTAAGAC |
| (SEQ ID NO: 638) | (SEQ ID NO: 718) |
| 3300027941\|Ga0207719_ | GACCCTGAGCGGTGAAAGCC |
| 100292_34\|M | CTCGACCCGCTCGC |
| (SEQ ID NO: 639) | (SEQ ID NO: 728) |
| 3300027941\|Ga0207719_ | GACCCTGAGCGGTGAAAGCC |
| 100292_35\|P | CTCGACCCGCTCGC |
| (SEQ ID NO: 640) | (SEQ ID NO: 728) |
| SRR6484323_megahit_ | CGTCGCACCTCGCGCGCGCG |
| k177_106899_4\|P | TAGGAGATGGTTTGG |
| (SEQ ID NO: 641) | (SEQ ID NO: 729) |
| SRR6484325_megahit_ | GTCGCACCTCGCGCGCGCGT |
| k177_1345066_6\|P | AGGAGATGGTTT |
| (SEQ ID NO: 641) | (SEQ ID NO: 730) |
| SRR6484787_megahit_ | GTGCCGCCCACGGGCGCAGG |
| k177_1514834_8\|M | GGTGGATTG |
| (SEQ ID NO: 642) | (SEQ ID NO: 731) |
| SRR8542065_megahit_ | GTCGCACCTCGCGCGCGCGT |
| k177_1115558_2\|M | AGGAGATGGTTTG |
| (SEQ ID NO: 641) | (SEQ ID NO: 732) |
| SRR8542065_megahit_ | GGTCGGCCCGCGCGCGCGAG |
| k177_821416_8\|M | GGGGGTTGG |
| (SEQ ID NO: 643) | (SEQ ID NO: 733) |
| FZPSO1000148_2153\|M | GTGCGACCCACGCGCGCGCG |
| (SEQ ID NO: 644) | GGGCAGAGG |
| | (SEQ ID NO: 734) |
| WP_005554257_1 | GTCGTCTTCGTCGCCGATAT |
| (SEQ ID NO: 645) | CG |
| | (SEQ ID NO: 735) |
| SRR7004341_megahit_ | TAACCAGAATAGCGGTAAT |
| k177_2665443_5\|P | (SEQ ID NO: 736) |
| (SEQ ID NO: 646) | |
| SRR8526178_megahit_ | GTTGTCTCCACGCGCGCGAG |
| k177_763700_3\|P | GGCGGTTTG |
| (SEQ ID NO: 616) | (SEQ ID NO: 714) |
| OVXO01016275_2\|M | CTTTCAATCCCATTTTGGTC |
| (SEQ ID NO: 647) | TGATTTTAAC |
| | (SEQ ID NO: 737) |
| SRR7067823_megahit_ | GCCTGCTGTCCACACTATCC |
| k177_107253_1\|P | CCCAAAAAC |
| (SEQ ID NO: 648) | (SEQ ID NO: 702) |
| SRR7067986_megahit_ | GCCTGCTGTCCACACTATCC |
| k177_69094_7\|P | CCCAAAAAC |
| (SEQ ID NO: 649) | (SEQ ID NO: 702) |
| SRR8554444_megahit_ | GTTGAGTGGCCACATAGTGG |
| k177_504614_2\|M | GAGCTGAAC |
| (SEQ ID NO: 650) | (SEQ ID NO: 738) |
| SRR8554446_megahit_ | GCCTGATGTCCACATTATCC |
| k177_83048_1\|M | CCTTAAGAC |
| (SEQ ID NO: 625) | (SEQ ID NO: 718) |
| SRR6201998_megahit_ | GTATTATGATAAAGCATTGG |
| k177_1568738_2\|M | CTAT |
| (SEQ ID NO: 651) | (SEQ ID NO: 739) |
| SRR8554511_megahit_ | GCCGTGCTCTCCGCGCGCGC |
| k177_4248910_4\|P | GTGGGCGGTTCG |
| (SEQ ID NO: 652) | (SEQ ID NO: 740) |
| SRR8554511_megahit_ | GCCGTGCTCTCCGCGCGCGC |
| k177_4248910_4\|M | GTGGGCGGTTCG |
| (SEQ ID NO: 653) | (SEQ ID NO: 740) |
| 3300014204\|Ga0172381_ | GTGCCGCCCACGGGCGCAGG |
| 10015437_8\|M | GGTGGATTG |
| (SEQ ID NO: 642) | (SEQ ID NO: 731) |
| 3300014205\|Ga0172380_ | GTCGCACCTCGCGCGCGCGT |
| 10102486_2\|M | AGGAGATGGTTT |
| (SEQ ID NO: 641) | (SEQ ID NO: 730) |
| 3300031566\|Ga0307378_ | GGCGCAACCCGCACGCGCGC |
| 10048523_2\|M | GCGAGGGCAGAG |
| (SEQ ID NO: 654) | (SEQ ID NO: 741) |
| SRR6837575_megahit_ | GCAGAGCCCACGGGCGTGGG |
| k177_854481_7\|M | GGTGGATTG |
| (SEQ ID NO: 655) | (SEQ ID NO: 742) |
| SRR6837576_megahit_ | GCAGAGCCCACGGGCGTGGG |
| k177_1219670_1\|P | GGTGGATTG |
| (SEQ ID NO: 655) | (SEQ ID NO: 742) |
| 3300009716\|Ga0116191_ | TGCGGCCCACGCGCGCGCGG |
| 1022210_3\|P | GGCAGAGG |
| (SEQ ID NO: 606) | (SEQ ID NO: 743) |

TABLE 10
Non-coding Sequences of Representative CLUST.196682 Systems

```
>3300009716|Ga0116191_1022210_3|P
GCCTTCCGCGCGTGGCTGTCCTACGTGGGCGCGGAGGTGACGCCGGAGGAGCGGCGCAAGGCGGAGAGCGCGGCGGTGAACGGG
GAGTGCCCGCCACAACGCAGTTACGGGACTTCCCAAGTCTTTGATGGCTTTGAGAACCCAGCGGGCGCAGGGATGACCAACCCA
GAACACGCCGCGCAACGTCACCGCGACGGCGCGGGTATCCTCACCCGCCTGCTGACCGCGCACTGGCCGTCGTCGGCGCAGGAG
CAGCGCGCGCACTGGGAGGCGGTCATCGGCGAGGTGCCGGAGGGCTGGGATTGCACGAGGCCGCCGGGGGTGAGGGTTTCGCAG
GGGCGATCCCATTGGGGGCGCGAGAGAGGCCGCAATGGTTCTCATGCTGGCGTGTTGGACAAGTCCTCCACTTTCGCGAACGAG
GCATCGCACGACACCGCCCCATCGACTCCCGACGCCGCGCGCTTCGACGGCCTGCGCGGCTCCGTCGCCCCGCTCAAGCCCTTC
GCCTACCCCATCCTGCACGCGCAGAAGCCGCGCGAGGGCAGCTACCTCGCGAACCTGCGCGCGCATGGCGTCGGCGCGTGGAAT
GTGGAGGAGGCGAGGGTGCCGTTCAGTGAGGATGGTGTCGAGGGCTTCTGGCCGGGCGCCCGAAGTGGACGCGGCGACCTGCAG
CCCCCGTCGTGGGGAGCCACAGAAGGGGGGCAGCGCGATGACGCAGGCCGCACCCCCTCCAACCTCCTGTCCTACGGCGACCTG
CTCGGCGACCTGCAACGCTACTGCGACCTCGACGCCTGGTGCGAGCGCCTCGGCCTGCCCGACGCCGCCGCCGACCTGCTCGAA
GCGGGGTTGGTCTACGCGCCGAAGCCGAGCAGGGCGGAGAAAGAGGCCGGGCTGGAGGCAGACAAGCCGCCCGCGTTCGGCAAC
GATAAGGGCGATGGCCTTGGGCGGGGCATCAGCAACACGAGACAGGATTGGGCGCGGGGCAACACGCATCCCACCGCGAAGCCC
GCCGCGCTCTGCGCCTACCTCGTCGCCCTCGCCACCCGCGAGGGGCAGACCGTGCTTGACCCGTTCTGCGGGTCGGGCAGCACG
GGCGTCGCCTGCGCGCGCATCGGCAGGAACTTCGTCGGCGTCGAACTCGACGCCGACTTCGCCGCCATCGCACGAGCGCGGATC
GCACACGCCAAGACCACACGACCGGCTCAGGAGGCCCTCCCGCTATGACCGCGGACCTCCGCGACCGGAAGTTGACTCATTCCC
TCCATTCTGGTATACTGTCAGCGTTCCAGGCAAGGGACTCAGAGGAGGTCGTTTCAGTGTACGCTCGACAGTTTTGCCCCCGTG
TCTCCAGCGACCTCCTGTTCCCTTGCCTGGGCAGAGACGCTGTCACGGGGGCTGTTCGTGTACGCGCTTCGAGACAAGCCGACC
CGGCTGCGGTTGGGTTGGTTGCGGCTACTCTGGGCCGCGAGGCCGGGCGATCAGACCCGGCAAACCCGCGAGTACAAGTGTGGG
CAGCATGGGGCGGGCAACTCTGCTCATCGTAGTGGGAGCTGGCAAGCATGATCACAGGAGGCAAGACTGATGATCAAGACCGTC
ACCTTCTATATCGCTGAAATGCCGAGGGAGGACAAGCGCCTCTGCGACCGCCTCTGCATCGACCTCGGGGCCGCCGGGGCGCGC
ATGGTGCGCGAGTGGTTCCGCGCCTGTGACGAAACCCCGCCCGGTGCGGCCTCAGACTTCCTCTGCTTGCGGTGCGGCTTCGCG
CGCCATGCCGACGTGAACGCCGCGAACAACATCGCGCGGGGGATGCAGGACTTCGATTTGCCAGCCGGGTCCGCCGCCCCTGGG
CGAGCGCTTCGGCTGGAGTTGAGCGCGCAATGAGACAATGCGGGCGGGCTGCGGTTCGCGCGTGTGCGGCGACTGTGCGCCGCG
AGGACGACGGTCAAGTTGGCGAGTCATTGTTATGCAATGAACACAGGCCTGCCCACGGGACGGATGAAGGGCGCGGTGCGCCTC
ACCGCCTGCGCGACCGTCAGCGACCTGGTGCGCGCGGGGCTGGTCGTCGTCGCGTGGGCCTACGAGAACGGCGACCTCGGGCTG
CGGGGGACGGAGGCGGCGGCGACTTTCTTTCGCGAGGGTTGA (SEQ ID NO: 800)
>3300012677|Ga0153928_1011778_2|M
AGAATGAAGATGCATTAATTTGGAAAGGTATAGCTTTCTTTACAATGAAGAAAACGTTATTTCTGACAATCGCAATAACAATCG
CTGTGGTGGCGGTAGCGTTACCTTTCGTAGCACCAATAATCGCAAAAGTAGCTAATGCTGGCGGTAGCGTTACCTTTCGTAGCA
CCAATAATCGCAAAAGTAGCTAATGCTGACGGTAATTAGTTTTGATAAATTGTCGGCCTATAAGGTCATGGGCATTAGCAATTT
ACAATATATTTGAAGCCTGAAAGCCCGCCTCCTTTAGGAGCGGGATGAAATGCTGACCGATATCTTAATAGCTCCAAAGCTCTA
GTATTTGTATGAGTCGAGGACTCTTCGAATGAAAATCACAGTTAAAGCAAAAGTCACAGATGACAGCAAAAACAAACTAGGAAA
AATAGAATCAGAGTTTCAAAACTATCAGGTATATTTGCAATCAGGATGTACCACAAGAGTTAATCTATATTCTGCGACGAAACA
ACAAGCACAAAACACATGCTTTAACTGTCGCACTAAAGATAAGAAAGCAAGAAAAACACAAGGATTGTTCCAATGTGGTAATTG
CAGCATTAAAACGAATGCTGATTATAATGGAGCAATGAACATCTTGCAACGAGGGGTTGGATACTTTCAACTCTAGTGAGCTTT
CTGACATACCCCGAACCGTCGGTGATTATAGACAGGAATAAAATGATCACGAAGGAACCCCACATGCTTTATCTCTGGGAGGAT
GTCAGAGGATCAAACGGCTAACAATACCATAGATAGGTTCTCCTCCGAAATGATGTCCTGTGTCTTTATCGTTTAGGCTAAGAG
TCATTGTGTTTCCCTTGGAAATCAATACTGATATATGCGCATTATTCCACATAGTTACACCATTTATTTTTACATCAGCAGTAC
CATTCAAAGATAAGCTATTGTCTGATGTCATTTGAACTAGTTGTGTTTTTCCTCCAATATTATCAATTTTGAAGTTTGTTATTT
GGTGAATATGTGGTCTTCTACCATCCATCGGTGATGCAAGGAAGTCTACACCAAAATTCGTAACGTTCCCTTTATGCACATTCA
AGTTCCATTCTCCAGATAAGATAACCTTAAAAGCATCAGTTATATTAAATCCAGATTCGGGAATTGTAATAATTAAAGAATTTA
TTGTTCCTATTGCAGAGAATGTATCCTTTGCTGGGATTGGAAAAAATACTGGTAGTGAAGTCACCGCTATTTTTTTAGCTGCAT
ATGCCTCATAGTAATAACTATGAGTATTGTTATTACTAGCGTTGATATCTACTACAACGACGATCCCTATTATTATCCA
(SEQ ID NO: 801)
>SRR6837576_megahit_k177_1219670_1|P
CTGCGGCCACCCTGCCCCGTGGACTCCCCCGAGGGGCAGCAGGTGCTGCGGGGCCTCTTTCGGCAGGCGTTCGCGGCGTTGCCG
CCGGAGGCGCTGGAGCGGTGCTGCGAGGCGATCACGGCGGAGGATGACGAGGACGCTGGTGGGTGATGCCCACACCCGCCACGC
GGCAGGCCCCCTGTCCGGCACATCCTCGACTGGGCAGGGGGCCAGGCACACACAGGACGCACCCGCCGCCGGCCTCCTTCCCCC
GCGGCGGTAGACGGACCCGGTCTTGCTCCCGCGCGGACCGGCGACGACAGGGGCCGGGGCTCAACTCTCACTCCCGGCCCCGGG
GCCCGAGCAACAGACTACAGACAGGAGTAACGGCAGTGACCACCGACAAGCAGACGGTAACCAAGACGCTCCGCTTCTGGCTCA
CCGACCTGAGCAAGGAGGACTTCGACCTCCTGCACAAGCTCAGCCGCGAACTGGCACGTTGCCACCGTCTGTTTGTCCAGGCGT
CCCTTGAGTACGCGTTCTTTGACGCACCCAACACACCCGGCAGGGCTGCGGTTCTGTCGGACGGGCCGAAATCACGGCCCAAGG
CGGGGCGGTCTGGGAGGTTGGTTCTGTCAGACAACCCCGTAACCCCGCGCCCAGACACACTGCAACTTGACATGGTGCTCTGAC
CTGTACAGGTTTCGCGAGATTCCTTGTAGGAGCGTGGTAGACATGCCGACATGCAGCAACTGCCTGGCCCTCACTGAGCGCATC
CGTCGACTCAAGGCTGACGAGGACGCGCACCTGGAACAGATCGCCGCCCTGGGAGCCCGGCTTGCGCGCAGCGAGGCCAAACTT
GCGCGGTCGCAGGCGCTGTGCCGGCGGCTGGCGAGCAACGTCGCCGCGCTGGGTGGC(SEQ ID NO: 802)
>OVXO01016275_2|M
CTCGTTGTGCCTATGACGGCCTGAATGACTTCCTC (SEQ ID NO: 803)
>3300013128|Ga0172366_10002984_1|M
TCGCTTAACCAAAGATGGCGAATAGAGAACTGGTGGTTGTGATGCAGGTGCAGAAAGTCGTCAAGGCAAAAGTCGTGGGGCTGA
CTCACGCTAAACGCCAGATACTCGACCACGAATACGAAGGGCTCCAGCGATTCTTGCAGGGGGATTCCAACGTTGAACTCGCCT
TCAACATAGGCAGACGAGCCTTGGGGCAAGTCTCCAAGGTAGGGGCTGTCGTGAGCCAGCCCGTAACTGGGGCAGTGCCGTTCA
GCGAACTCGGTAGCGTCGTTCAATGTCCGACCCCAGAAGCCACCCTTTTTAAAGGGTGGTAGTTCACGTGCGCGAGCGCCTGCG
GCGTTTAGTCCAATCTACTAATAGGTGCTCTCCCATCTCCCTAAATTTCCTCGCCGCTGGAGAACGCGGGGCATAGCGAAGAAC
TGAGCTGCCAGCGGTCAAGCTCTCACGAACTTTATCGTCATCGGGTTGCCACTCAATTGGTGCTTGGACAGCCCCAGTCCATGT
TTCAATCAGATTCCACCCAATTGGAGCTTGCACCGTGCCAATCCAAGTTTCAATCAGTTGCCATGCGGCAGTGACCGTGACTGT
CCCAGTCCAGGTTTCGATGAGTTTCCATTCACCAGTGGCAGTGACTGTTCCAGTCCAAGTTTCAATCTCGTACCACTGAGCAGC
TGCTGGTGCTTGGACCGCCCCGGTCCATGACTCGGCGAGTTGCCATTCAGCCGGAGCACTTACTGTCCCAGTCCAAGAATCGAT
CTGCTGCCACTGTCCCGTGGTTGCATTAACAGTCCCGCTCCAAGACTCGACCTGACGCCACTGACCAGTGGTCGCGTTGACCGT
TCCAGTCCAACTCTCAATCTGCCGCCACTGTCCCGTGGTCGCGTTCACAGTCCCAGTCCAGCTCTCAATCTCGTACCACTGAAC
AGCTGCTGGTGCTTGGACCGTCCCGGCCCATGACTCGATGAGTTGCCATGCAGCAGGGGCGGTCACCGTGCCCGTCCAGCTCTC
GACGAGCTGCCACGCGGCCGGGGCGCTCACGGTGCCAGTCCATGTTTCGATGATCTGCCAGACTGCGGAAGCATTGACCGTCCC
CATCCACGACTCCACCAATTGCCATTCAGCTGGCGCCTGAACGGTTCCAGTCCACGTCTCTATGAGCTGCCACGCTGCAGGTGC
ATTAATAGTACCCGTCCATGTCTCGATCACTTGCCAGACGGCAGGCGCTGTCACGGTCCCAGTCCAGGTTTCGATTGTTTGCCA
AGCCGCGGGTGCGCTGACCGTTCCAGTCCAGGCCTCGATTAGCTGCCATTGGGCAGGAGGTGGAACCACCGTGAACTGCCAAGT
GTTTTCAGAAACATTCTCACCCGCAGCGTTGACCGCCCACACTCTCCAGTAGTAGGTCCCCGGGGTGGAGAAGTTGCGCTGGTA
GATGTTGTCGGTGTTGTCTTGGTAGTTGTCCACGAGCGGCGTGGAGAAGGTGGGCTCGTTGTCAATCTCGATCCTATGGTTCTC
CCCAAACCACCCGTTGTCCCACTCGAAGGTCACAGTTTCCCCGACCCCGAAGACAGAGTTGTTCTCTGGACTGTAGAGCCTGGG
CCTCTTCGGAAAGAATGTGTACTCGTATGTGAAAAAGATAGTACCGGTAAGAGCGGCGCCTGTTCCCATGTCGTATTCAAAGTT
GTAGGTCAGGTCGGCAAGGGTCCTATCTACAACAACGTCGATGTTGTCTTTGTTTACAGAGATGGATGTCAAGGCCTCCCCAGA
GCTGCCTGTGCTCATACTGACGGCTGAGCCCCAGTTTACCCCATCAGCTTAGATCCTGGTCTGTCGCGTTTCCGAAGCGGTTGC
ACTTCCTATCCAATATGCCGTGAGGCCAACGCTCTTCACAGTCTTTTTGTTTTCCGGGGCATAGAACGTCAGCTCCCCGCTGGT
CCAAGGGTCACCGGCAGCCCCGCTGGGTTTTTGGCCCGCGGTGAACATCGTGGTTTTCAGCTTTGTCGCGGCCGATGGGCGGAA
GTGATAGGTGATGTGCAAAAGGCCGCTTACCTCATAGAGGTCGGAGGCCGCAGCGCTCTGGATGTTGAGGTTCACATTGTCCCC
GTTCGACCAGTTCTCCCTCATGAAGGCGCTGATGTCGTGGAAGTAGTCGAACCCCTCTACATGCTCGCTGCCTATGTTGGTCGT
GTAAGCTCCCGAGGTCTGGGTTTTCGCCCCGACGCTCGCGTACACGCTCGTGCTGCCGTCACTAGTCAAGATGGTGTGGAAAAT
TTCAAAGTACGCGTTCTCGATGTTGTCCACGCGAGAGCTGTCCAGGTCCGTCAGATAAACGGGCGTCCCGAAGGCGAACAGGTT
GGCCGAGCCGTTGACGTTGGCGGCCCCCATGGCAAACGTGAGTGTTTTTATCTGGTCCGCGCTGTTGTCTGAATACTCATATGT
GACGTAAGTTTCACAGCTGAGCGCATCGTTTGTTTGTCCTCCGGTAGTAATTGTAATATCCTGATCAACGTTGTAGTTCCAGGA
AGCCGTCGGCCGGGAAATATACCAGAAATTGAGATCGTTGCCGGTACGGGCTTGCTCTGTCCAAGCATTTGTGGTGGCTGTATC
GCTTCCGATCTTGATGTTAAGAGAAAAGTCGGTTGAAGAGGCTTGGGAAGAGTGGGCATGGATTTCGTACCAGTTGTCCCTCAG
CGTGACCCCGTCTTCTGGGATTTCGATTCTGTGTGTGTAGGTCGCCGTGCCGCCAGCCCCTATCTCGGTGTTCGTGCTCCCCAC
AAAATACCTGACAGTCTTGATCTTCGTGTCCGCCAGCTCGTTCTCCTCATATGTGATGTACATCTTGGCCGTGTGGCTCTGGAT
ACCCGCGTCAGTGACGGTTAATTTTGGGTAGACGGCGGCCCCGTTTGTCCAGTATGTTGTAAAAGCAGAGGTAAAATCTGCGAC
CACCCATGCCGCCACGCTTTCCCCGCTGTTGGCGGTGTACTGGCCGGTCACTGGGTCTGCGTCTGGGTTCCGGTCGGTCCCCGC
GATGTTCAGGGTGACGGTCATATCTGTCACGTTGGCAGCAGTCGATGCCCCCGTCTGGACGTGATACATCACGAACACCTTCCT
GAACGGCCCAGCCTTGTCCGGGATGTAGATGGTTTTTGTCGGGGTGAACGAGTAGGCCGTGCCAGTGCCCAAAGCGGACGATGA
GGTTCCTTGCCTCGTATCCCATGAATATTGGATTGTGTTTATGGTCACTATATTTTCGTTGGGTTTGGTGGGGGAGGGAGTAGC
CACGGCTAGGGGCTGCATCGAGATAACGAAAACGCTGGCTAACATCATCGCTATCAATACGAATACAAAGATTTGTTTTGCCTC
CTTCCGCCCGAACTCTTCCCGCCCCAACCTAAACAAGCTACAACCCATCTCCCTCACCTGCTTGCCTCCACTTGGACTATGGAA
TGGGCGCGGCTCACGGCAGAGCCATCTCTCATCTCTCTCAGCAGGTTCGTGAAGTACTCAATCCCGCTCGCGGTGAGCTTGCAG
AGCTTTCGAGGCCTCCCCCGGGTTAAACGGGGCTC (SEQ ID NO: 804)
>UOPD01011681_4|M
CGCGTTCGTGCAGGGCTTCCTTGCGATCCGCGCAGACGTGAAGCACCCGCAGGCGGAGGATGGCGAGGACTCGTTCGGCGATCA
GTAGCGAGTGGTATTGACAAGCCGCCCCATATCATGTAAACTGAAAGTGTCCCGGCAAGGACTTGAGAGGAGGTCGCGTTCACA
ATGCACATCAATAGGATTGCCCCCGCGAAAGCGCGACCTCCGTTTCCTTGCCGGGACGAGAGCGTTGCTTTTCGCGGGGGTTTT
GCATGTACGCTTACAAGACGCCTCGAACCGGCTGCGGTTGGTTCGACTGCGGCTACTCTGAGCCGCGAGGCCGGGCAACGAGTC
GTCCGGCAAACCTGCGCGCGCCCCAAGCGTGCGATCCACGCGCGCGGGGCAGAGGACAACGGCACGTGACGACCGGTTCGACGT
GCGATCCACGCGCGCGCGGGGCAGAGGTAACCGGGTCAGAGTGTCGTACATAGGGCACCGTGCGATCCACGCGCGCGCGGGGCA
GAGGCAAGGCGGCCTGGGCGGCGCTGGAGAAGGCGGAGAGGCAGGCCTCGCAGCGTGCGATCCACGCGCGCGCGGGGCAGAGGA
GGAGAGATAGCTAAAGCAATGATAAAGACCGCGACATTCTATCTGGCCGACATGCCGCAGGAGGACAAGCGCCTGTGTCAACTC
CTCTGCGATGAACTCGGCGCGGCGGGCTCCGCGATGGTTCGCGAGTGGTATCGCGCCTGTGACGAAGTAGATGGCGAGCGTATC
GGCCCCGACTTTGTTTGCCTGCGGTGCGGTTTCGCCCGCCATGCCGACGTGAACGCAGCGAACAACATTGCCCGTGGCATGGAT
GACTTCGACTTGCCGACGGGCGCAAGCGCGCCGACGAAGGCGCGGCGATTGGAGATTGCATCATGAGAAGTGGCTGTCGGGCTG
AGGTTTGACGGCTTGCGGTGATTGCGCACCGCGAGGATAGCCGATGGTTATCAAGTGCTGATACAGCATCGCAAGCGCAGATGA
TGGTGCAGAGATCGTGCTTGACGAAGACGAAGTGCAGAAGCTCAGGGAGGCGCTGGAGGAGCACGCGAAGAGCAGTCCGCAGGA
CTGACGCACACGCCGCACCTGCTGACGCGCATGGGGACGCACGGGGATGCAGAGCGCGCAGCGAGAGGTTGCCGGGATGCGCTT
GCAATCGACGAACGTTCGTGCTATAATGGAGGTGTCTGGAGAGACACGGCGCGGCTTTGCGTTCTATGGCCGCCCACCACAATC
TGACCGTGACCATATTGCCCTCGTGCAAACCTCCGCGCGTGTCTCTCCAGACTGCGTAGGCGGCCAGCGCGAGGGCTTTTCTTT
GCTCCGGGGTGATCCAGTTCGTGGCTAACCCAAACCACTACGTCAAACTCTTCCTCGCAACGTTCGACGGGCAGTCCGCCGATA
TGCAGGCGCTCACTATCGGCCAGAAGTACGTGTGGCTGGCGCTCCTCGCATTTGCCCGAGCCTACAGACCGTATGGCATTCTGA
ACGCAGGAGAGCACGAGGGGCGTCCTATGCCCGCGAGTGTCCGCCGCCTGGCTGACTGGGCTTCCGTTGGAGTCGGCACTGTGA
GTGAGGCGCTGGCAATCTATGAGAAGAGAGGAATGATAAAGCAGGATAACCGGCGCAGTGATCCGTGTTGGGAGATCGTCAACT
GGGAGAAGTGGCAGGTGTCTCACGGCCTCGAAGAGTGTTCGGGAGCCGAACAAGATGGTGTTCGGGAGGCGAACACACAGACTG
TAGCGCGTTCGGGAGATGAACAGCACTGTTCGCCATCTGAACGCCAGTGTTCGGCAAATGAACAGCAGTGTTCAGATGGCGAAC
ACCTATCTCCGGACGCAGAGTGTTCAGGAGGCGAACACAAACAGGTAGAAAGCCTAGGGGCGCAAGGGCTATTGGCCTTAGTAT
CTGACGAGCAGGGGTGTTCGCCTACCGAACACGATTCCCTAGACGTTAAGAGAACAACATTAACAGCAGAAGAAGGCACGGCTA
CTTCTGCTTCTCAAGTAGATCAGGCACGACAAATCCTCTGCACCCTTCTTCGCTTGCCCGATGGATCAATCGCGATTGATGCCG
CGCTTATGGCGGCCTCTCGTGTTCATCCGCGCGCCGCCGATGTCCTTGTCCAAGAGTGTGGAGCACTTGCGGCGCGGGAAGCTC
AAGGCGGCAAGCCGGTTGATCTACAATACCTCGCCTCGAATGTTCGCCAAGCGGCGGAGCGACTTGAGCAG
  (SEQ ID NO: 805)
>3300025638|Ga0208198_1021643_2|P
GTGCGGGTGTGGCGCTCGCACCGGGCTGAATATCAGGAGGCGAGCGGCATGCAGGAGGCGCTGATGGTCGTGGCTGGGATCGTG
ATCGCGCTCGCGGCGACCGGATGGGTCTGGTTCGCGCTGTGTATGCGGGAGGGCTAGATTGAAGGCAACGACCATCACAAAGAG
CCTCCGCTTCTGGATCGACGAACCGCCTGAGCGGTGCCGTCTCCTCTATGGCGTCAGCGATGAACTCACCGATGCATACAACGC
TATCCCCGAGTACTGGAAGACCGATGTCCGCAAGGTAGCCATCCGACCGTCTACACAGCCGGCGGGACGTATCCCGTCGGCCGC
GCCCGACTGCACGGGCGAGGCAGTGAAGGCGTCAGACGTTGACGCTGAGCTGCAACCTGCGCGCACGCCGGCAGCTTGTGGAGG
TGATCCATATGCCGGCGAGTGAGCGAGTGGAGAGGTGTGGGGCCCTGGTCTGTACGGGGTAG (SEQ ID NO: 806)
>3300014204|Ga0172381_10015437_8|M
GACCTTAATGCTGCGAATAACATCGCGCGGGGGATGCAGGAGTTTGGGCCTTGTGTCCAGTCCTCCGCGTCAGACAACACTATC
GAGCTGCGGTTCGATGGTGCGGGGCAAGAACCTGCCCTGGGGCGGGCAATGCGATTATTCGCATGAGTCCGCAAGTCTCTACAA
GCGAGTGCGACCCCGAGATGGTTTGGAGGCAACCAGTGACCATACAGGAGCGAGTCTACCAGACATTAGCCGCACGCAACATCC
GTCCATCAGCGCACCTGCTGCACGATATGGGCCACTACGGCGAGGCTCAGGCGCTCAGTCAGAACCCTGCCGAGAACCCGTTGC
AGCAGGCGCTCAGA (SEQ ID NO: 807)
>3300014204|Ga0172381_10015437_8|M
ATCTACCGTATGTGCCAGATAGTCCGCATAAAGCGCCTGCAGATGGAGCAGTTTCGGAGAGCGCAGGCCAGGGCGGAAGCGGAG
ATGGACTGGCGCCGTCAGGCGCATCGCAAATGGCAGCGGTTGCGCGAAGCGATGGACAGCCGGTAGTCGTCTTGCCGTGGACCT
CTCCCGCCGCGACTGACATGCCCGGAGGAAACTCTGGCCCCCCCCACACCCGGGGCTCCGATCACAGCCGGGGCCCCGGCCCAC
AGGCCGCACCCCCGCGTTGGCGGGGACAACGACATAAGAGGTAGGCCGTAGACGCAGAGGCACAGAGGACGCGTGACGAGGGGC
GCTGCGACAACTGCACGGGAAGCAGTGACGTAGCGCCCAACCCACCATAATCGAGGAGCAAGCGGACCGTGGATACTGCAGCGA
ACGAGACGACACCCAAGGCTCTGTGCTTCTGGCTCGGCGCTCTGAGTGATGCCGGATTCAAGCTCCTACATGAGCTGAGTCGCC
AACTGGCACGGTGCCATGCGACGTTCGTGCAGGCGGCCCTGGAGTATCAGGCAGACCTGAACGCTGCGAACAACATCGCCGGGC
GTGACCCGGCGACAGACTTTGACACACCCGATCGGGCTGCGGTTCGGTCGGACGGGCCGAAATCACGGCCCCAGGCGGGGCGGG
CGTCGCGACTGGTCGCGGCGTCAACCCCGTAACCCTGCGCACCTAGACATCGGTGTTGGCACATTTCTGGTCTGCGCAGCTTGC
ACGGAAAGCAGTTGACGTGGCGCCCCACCCAACACACAGGCCATTCCCCGCGTTAGCGGGTTGGCAGGCAAGGCGTGCAGGGGC
CGGGCTGGACACCCGGCCCCACTATTCCACAGGAGGCGGACGATGCCAGGCACGGAGACGGTGACGGTGACAATCCCTGTGGAC
TACGTGACGGCCCGCCGGATAGCCGAGCTGGAGAGGAAACTCTCCCAGGCCAGGGGCGAGGCCAACGACCAGGAGTGCGACGCC
ACCTTCTGGCGGGAGAGGTGCGAG (SEQ ID NO: 808)
>WP_005554257.1
GCGGAACCGTGCCGTTTCATCGTCGACGCGAAACACGACTAACCCGCGGCCGCCTGCGTGAAGCGCGGTTCGCTCGGGTAATCC
CGACACCGGCTCCGTCGGCTCGATCGCCGCCGGGTCAACTACCTGAATCTCGTCGCTCATGTTCATTGTACCGATGGGGTCGGG
TTACAGAGGTTCGAGGAGAAAGCCCACGACTTCAGTCGTGGGATGAATCCGATCAAATACGACACAATCCATCCTCAATAGCCG
ACCGAAGGTTGATAGAATCATAACATCTAATATAGATTGACGTCTATATAACAGTATGCCACGGGGGTACAGCCGAGAGCGAAC
GTCGGTTCACAACCTCCACTACCACTTCGTGTGGTGTCCGAAGTATCGTAAACCGGTACTGACAGACGAGGTTGCCGACCGCCT
CGAACACCTCATCGAGGAGAAAGCCGACGAACTCGGACAGGTCAAGGGCTACACCTCGCGGAACCTTCGCGACGAGTTTGATTT
CGGCCTCCCGTCGCTGTGGACACGCTCGTACTTCGTCTCCTCGGCGGGCGAAGTGTCGAGTCAGACCATCGAGGAGTACATCGA
AGCACAGACTGGGCAATAGCGATGCACCGCGAAGTCACTACCACAGTACGTGTCAAACTCCACTCGCTCACCGAGCGGAAAGCC
CGCCTCATCGAACGCGAGTATACGGCGTTCCAAGACGCCGTTCACGGTGGCGACGCGAGCCTCTACTCCGCCACCAAACAACAG
GCGGACATTCAGAGCCCGCTATCCACGGTGGGGGCTGCCGTGGCTCAGCCCGAAACGCAGGTCGTACTCGACGGAACCAGCGGT
GAGATGGAACCTGCGAACTCCCCGAAAGACGTGGGCCTAACCCTCAGTGAGGGAAGTCCACGACTTTAGTCGTGGGAGAAGTCA
CGTCTGTCGGATGACCCACGGGCTCGCGGTTCGAGCCGTCGCTCCGCCGCTATACCTCCCAGGGTTCGCCGGTCGTCTCGCCGA
ACAGCTCCCGCATGAGCGTGACGATGCTTTCCGGCGGGAACTGGCCCCGTTCGGTGACGATCGCGTCGACGTGACGCGGCGGCG
TGACGTCGAACGCCGGGTTCTCCACCGTGAGTCCTCCTCGGAGTCGTCTATCTCGTCGTCGCCGTCGTCATCCGAGTCGTACTC
CTCTCCGTCGTACTGCTCGTCGTCTCCGTTTTCGCTCTCGTCTTCGTCGTCGGCCACCCCTTCGTTGTCATCCGCTTCGCCCTC
CTCATCTCCGTCGTACTGCTCGTCGTGGTCGTCCCTCTGGTCTTCGCTCTCCTCCTCACCGTCGTCGTCATCCTCGTCGTCCCC
ATCTCCGCGATCATCGTCCGCCGTTTCCTCACTTTCGTCCTCCTCTCCATCGTCTTCGGCATCGTCGCCGTTTTCTCCATCACC
TTCGTCACCCTCGTCGTCCTCGCCAGTCTCTTCGTCCCCATCATCCTCCTCGCGAAGCGCGACGAGACTGTCCTCGTGTTCGAC
GTAGAGCGTTTCGTCGCTGATACCCAGGACGTTGCCGACTGGCAGCTCCCCGGCTTGGATCGCCCAGCGCTCGCTTCCGTCGTC
CTTGTCGAGGGCGACGAGTTCGCCGTCGTATTCTCCGTACGTCGCATCCGTCCCCCTGAAGTAGACGTAGACGGTGTCGCCGGC
GATGATCGCGCGGCCGACGTTGCGAGACACGTCGACACCCCAGTCGTCCTCGTCGCCGTGATAGGCGCTTCCCGTGAGCTGGTC
GGCCTCGTACCCGCTGAGGTAGCGCTCCTTGCCGAGCGTCACCGAGATCCCCTCCGCCGACACCTTCGCAATATGCTCGCCGGT
CTGTGCGTCGAGGAGCACCCGGGCGTAGAAATCGACCCGGCTCACGACGACGGCGGTCGACGTCGCCCGTGCCTGGGCGCCTCC
GGTGTAAAAATTCGAATCCCCTCGCCAGACCTCATCACCCGTATCGGGGTCGAGTGCAACCGTTGCACCGCCTTCCAGATCCCC
CGCGCCGGCGTAGACGACGCCGTTCGCCGCGGCGGTCGTATCGAGGAAGTCGTACTCCTGTTCGCCCTCGTCATCGTGTTGGGT
TTCAGCGGTGAGCGTGTCGATCTCCCATCGCACCGACCCGTCGTCGGTCCCGAGGGCGTACAGCGTGCCGTTGACGACGACGAA
GACGCCTCCGTACGCGACGGTCTGACTCTGAATCGAATCCTCCGGCTCGAACTCGGTCTGCCACCGGACGCTTCCGTCGGCGAT
GTCGAGCGCGAACAGTTCGTCGCCGGTAACGTAGACGGTGTCGTCGACAACCGACGGCGCGTTCGCGTCGACGTCGGTGTTCTC
CCAGATAATCGAACCGTCGGCGACGTCGAGCGCGACGACTCCGTTCGCATTCGTCGCGTAGACGACGTCGTCGGCGACGGCCAC
GCCGGCGTCTCGTCCGAAGCCGAAGTCGACCGACCAGGCTGCCTCGGGCGCGTCGCCGTCGAGCGCGGTCCCGTCGGGGACGTA
CCTCGCGTGCCCGGCGTCGCCGTCGAACGACGGCCAGTCCTCGTCCATCCCTGGGTTCGGATCGCGGTCCGAATCCGGTAGATC
GTCGGTCGACTCCTCCCCGGCACCGATCGACGCGAGGGCTCCCCCTGCAGTGAGCGTTGCACCGGTCGCCAGCACCGAACGCCG
TCGCCACTTCGTCATACGGGTGTCGACGACAGAATATCGGATTACTATCCAGTTGCTACGGCTGACTTGTCCTTCCTGCAACTG
TTTCAGACGGACGAGCACCGAGCTTACTCGACGGAACGGAACCGACGGCATCGACCCTCGAAGACGGACTCGCGGGCTCGGGCG
AAGCGGCTTCCGGCCGTTACCACTCCTGGCCGGCGGGTTCGGCCTGCCGTGGTTCCCCCTCGTCCTCGGACGTCTTCTCCCCGC
GGACGACGAAGTACGCGATTGCGGCGACCACGCCCAGCGGGAAGAACAGGAACAACAGCCCGGCGGTGCCGAGCGCCCAGAG
(SEQ ID NO: 809)
>SEJ25361.1
GCAGTCGTTGCATCGATCTCCCGACTCGCAGCTGGCGAGATTTCGTATTCGGCCCGTCCATCCTCGGCAGTGAGGTTCTGTTTG
ATTAGGTCAGCCCGCTCGTTGAACTCGACGGCGGTGCTGGTGTCGGCGTCGTATTCCGGATCGCGGAAGTATTCCCGTGGCGTT
TCGGGTTTGCGGTAGGCGGCGTTGGGGTTGTCGCGGTTCCACTCTCTGTTTTCAGGGATCTCGGCGTCAAGCTGTTGGTGGAAG
AACTCGATAGCCGCTGCCATTGCCGCCTTGATCCGGTGTTCTTCGGGTGGGTCGACGGCGAGTTCGGCTTCGAGTTCCGAGTAG
TCTTCATCAAGATAGTCCTGTTTGGTCTTGGTGGGAGTCGTGTCTGTCTCGGTCCCTTCCCCCGTCTCTGATTCAGTCTCCGTC
GACTCGTCGGTGGGTGTTGCGGTGTCGTCTTCGTCGGCGTCGGCGTCTTGATCGTCGCTAGTTGCTGTGGTTTCGGCAGTCCCG
TCTGTGTTGGCCGCTGTCTGCGGTTCGTCTGTGTCGGTGGTAGGATGTATCGGCTTCGGCGTCCGATTGCTCACCAGCCGATTC
TGCGGCGTCTGTGTCAGCGGCAGTCTGTGCGGGGGCTTCGTCTGACGTGTTCGAGGTGTCGGCCCCATCACTTCCATTTTCACT
CTCAGCACTTTCCCCACCTTCCTCACCCGTGGTTGCTGGGCTGTCGTCTGCAGTCTCGGTGTCGATTGATTGCTCACCGTCTCC
GTTGTCGCCTCCATCATCGTCATCGTCGTTGTCGTCGGTGGTTTCACCGCCGAGTTTCCGGGTGATCTCTGGGCCCTCGTCTGT
GGCGGGGTCGTTGATCACATACTGGCCGTCTGACTCAAACGCCGGAGAGTAGATCTCGCCTCGTGAGACTGCATCCTGGAGTAT
CTCTTCGGCTTTGCCGAGTGGCTTCGGGTCTGCTGAATAAGATTATCTCATGTATGGTGGTTGCGACTTTGTATGGCTTCGAAC
GCCTGAGTATATTATTTTTATTTGTTAATATTGCAGTTGTAATATAAATAAGACCATGAAGAATACGATACTAGAGATAATTAC
GACGCGTCGAAACCAACCAACACGGAAGCACCAGTATTGCTCTCGATCCGACGGATCAGGATACTGGCACCTCATCTATGAGTG
GGTAGACGGTTCGTGGCAGATCGTAAGCCGCGACCCACTCGACGAGATCGAGATCGACATCTCCAACTCGCGTAGTGATTGCAC
ACCAACCCCACTCGTTGAGTGTCCTGTGTGTGGTCGGACTGGACTTCCCGAACGGATCGCCCAGCACAACTGTACACCAAGGTC
GACACAGTAAGCTAGGAGTCAAAGATACAACCAATATAAACACACCAAGCCATTACCAACAAAAATATATGGTTACGGGTGTTG
TATAACTAGTACTAGTTGTTATTCACGCATCTCCGCTCGCTCTCGTAGGCTGTTTTCGGTGCTATCATAGAGTATAAATTGGCT
ATCGACTCATCTGGTGAGTTCCTCAGTCGACCGCCCGACGCGGCGATCAGTGGTGAGAGGAACAGCAAGACAGCAGAAGAGTGA
GATTGAGAACTAAGATAGAGCACCTCGCACCTCCAAACAGATGGACGACCAGTTCCGAACACGCTCGTGTTTCGTCGGAATCGG
CGCCACCGGTGCCGAGCGCATCGGTGACGGCATCGAACGTCGTGACGCAAGTGCCACGATGGTTCCGGACGAAGTTCCGGACCC
AGCCGACGCCGTCGTCGACTGCGTTGCCGCACCGAGGGCAGGTTGTACTCTCCCAGAACTGCTTGAGTCGCCGCTCGATGGCCG
CATCGAGCGGCTCCGTGTTGATTGTGATCACGCCCAGATCGACAAGCTGGCGAAGCATCCGGCCGAAGGCTGGATCTGAGGAGG
ACATACTCCCTCATTTGACACCGTAGACCGTAGCTATATGGACTTTCCACGTTTCTACATAAGAGCGCAACAGGTTAACCAACA
AATCTATCTTATACTCGTTTTGTTGGTTAACACAAGGCGCTCTTATGTGAACCACCTCGCGGTCAAGCCCCGAGGCACTCGCCT
TGCTTATCTGTAGACGTGGAAATGTTCAAAAAGTGGTTCGATACCCTCAAGAGATCACCAGCCGGCCAACATTCGACGTCCCAT
ACAGGTACTAAGTGACGCTAGCACTGATTGTCAGAAAAAAATTTATGAAACGGTGGTGTGGCCCTCCGATTTAACTCTTGCAAG
GCTAAGTCCCCGTCCTCAAGGAGCAACGCAGGGAGCGTAGCGACCGAGTAGCGCAGTAGGGCGGGGATACAGCCGACACGAAAT
TAGGCACCCCACGAAATCGCACACCCTAACCAAAGAATTACATGATTGTCACCCGATAGTGGAAGTGAACCCACAATGGAATAC
GACCTCGATACGGGAGCGCACTCAACGTACTCCCTGCACTACCACCTCGTCCTCGTCGTGAAATATCGACGCGAGGTGTTCACC
GAAGAACTTCATGTTCACCGAAGAACTTCAAGGGTTCTTCCGCGAGGTCGTGAGCGGGTTCGCTGACAACTACGGCGTCGAAAT
CAAAAACCTCGAAGCCGACCGAGGCCACGTTCACCTCCTGTTCAAAGCCACGCCCACAACCGACCTCACCAAATTCATCAACGT
CCTCAAAGGCGCATCGGCTCGTCGCATCCGCAATGAGTACGGCGAGCAAATCGGGGACAAACTGTGGGGTGACTCGTTCTGGGC
AGATTCGTACTGTCTCATCTCGACGGGACAGGTATCGCTGGACATGCTGAAAGAATACGTCGAGAACCAGCGGGAGCGTGACGA
CGAATGAAACAGACTGCCGAGAAAACGGTCGTGGCAAAAATCTTCACCAACGACCTAACGCAGTCGAAACTTGACGCCATCAAC
CACGAGTATGAGGCGTTCCAGCGATACATTCGTGGTGACGAGGAAGCAGATCTCTACTCGGCCACGAAATTGGGTAAGGACATC
GCGTGCCCACTATCCAGTCTCGGCGCAGTCTGTGAACCTGTGCTCGGACCGAGCGGTGCTGACCAAGCCTCTGCCACGGTATGC
TTGCGAGCCGACTTGGAAGCCCCTGCCTCAACGAAGCGAACCGTTAGGTGAGCGAAGTAGGCAGGGGTAGTTCACTTGAAATTG
CTGAAATGGTGGGGGGTGTTGAGGAGCCTAATATTGGTTCAAGACCCGCTCACCAACAAGACTAGGCGTTCGGTCGATCAGCAC
TGATGCGCTCAAAATCGATATCTGCGAATCGAGTCGTATCCTTGATAACTTCGACTGCGATCTCGGTATCAACTTGCAGCTGGT
ACTCCCATGCTGGCCCACCGATCGAACCTGCCGTCACCTTTTC (SEQ ID NO: 810)
>3300014886|Ga0180300_1000742_9_2|M
GGCAGGTTGTATTAGACGGATTTTATTTAAAATTGTTTCTGGTAGGTTGTTTTCTCTGGGTCGTTGTGAAGGTTGGAAAATCTG
TTAGGGGTTTATAAAGATCTTCACGGTTTGGTTGGTGGTTTAGAAAGTGTTAAAAATCTTATAGGTTTAGATTTCTTTACTGGG
TGGTGTGTGTTGAAGACTTTTGTGATCTATGATATCTCCGATGATCGGATGCGGGAGGGGTTGAGGGAGCATATTAGGAACTAT
GGTCTTCGGCGGGTTCAGTATAGTGGTTTCCTGGGGGAGATGAGTCCCCATGATCGGTTTGTCCTTTCTCGTGAGGTTGATCGT
GAGGACCTGAGGGCACTTTACAGCGATGTGATGAAAACCTTGCATGATGAGGCCTTTTATGAGGGCGTTTATAACCCAGAGGAG
GTCGAGTATGCTATAAAACAGGTTAAGAAGATGATTGAAGAATTTAAAGGAAGTTAAAACCGCATATTGTTAGGATTCTTCTTT
TTACCTATTCTCGGCGAGAAATCCTCCCACTTTAGTGGGGGGATGAATCGCCGTTTAAGTTTAAATATCAGAAATCTTATATTT
GTTTCGGGCGAGTCGCCCATGAAGGTTAAGAAGACAATTAAGGCTAAGATTCTTGAGCTTCGGAAGGGCAAGGAAGAGCTTTTG
AAACGTGAGTATGAGAATTGGCAACGCTACCTAAGAGGCGATAAAACGGTTCCGCTTTATTCTGCGACCAAGCAACAGGCAGAT
ATACTCAAGCGGGCTATGGGGCTAGTCTCCGTAGCAGGGGCTGGATTGACACAGCCCAGAACTCGGTATGATGAAGCCAGAAGG
CCGAAAAACCGAGAATCTCCCCACTTAAGTGGGAAGAGTGTCAAGAGTTATTCCTTCAAGTTCTAAGATGAGTTTCTCGCATAG
GTTGTAGGTCTTCTTGGCTCTGTTGGTGGCGTCCTCTGCATCGTTCTTGTCCATGACCTCGTTGGGTGGTGTGAGGGTCTTTTC
ATCCCCGTATAGGCTTGGCTCCCTTTTCTTGAAGAGGAGTTTGGAGGATTCGCGTAGGAAGTCTATCTCGGTTTTGAACCAGTC
TGGGAATCAGTCTCTGATGTCGGAGAGAAGGTCTGATACCTCGTGGATTTTGGGGTACTCGATT (SEQ ID NO: 811)
>WP_006630662.1
CCCTTCCGGTCAGTTGAACCGTAGATCGAAGCGGAAAATTAAGTCAAGTCCAAATGTTGGTCACCGTCGATACTGGCAGGTAGA
ACAGGTTTATAGCCGGATATTGATGTCTACACACCCCGTTCTAGTTATGGAAGCGACAGCACTGAACGCTACTTTCCTTCGAAG
AAATCATCTATTTGTGCGTTGACAACAGATTTGATTAGATCGCCTTCATTGTCTGCCTCTTCAATCCGGATGTCAGCTCGAAGA
GTTTCAGCAACCACACCCGGATCATCAACAAACGTGTACTCCTTGTGAACGACCTCGTCACGGATCTCGGCGAGTGCTTCGTCG
TCGACGCCGTGGTCGTGTAATCTCGATTCGAGGCGATCGATCGAATCCCGCGCGAGTGCCGCCTCCTCGTCCTCATCAGGCCGA
TACGTCTGTGGATCGCCCATGAAGTGGCCCATCCGTCGGTGGACTTGAACTTCGAGGAGTGTGGGTCCGTTCCTGTCCCGGGCT
CTGCCGATTGCGTCAGCGGCAGTTTCGTAGATGGCAACGGCGTCGTCGCGGTCGACGCGAACACCTGGCATATCAAACCCGGCT
GCTCTGTCTGACCCGTCTTCTACGTCCGTTACAGCGGTAGCAAGGCGAAAGCCCACCCGTTCACGGGTGGGATGAAGCCGACAA
CTGGGAATGTATCCACGTTCGTAGCCACGGCTTGGGGTTGATATTTGCGTAACATCTTTCGATGAGTTACTTCTATATACCGAC
GATGCCTCGCGGGTTCGACCGAGAACGTACCAACATCCACAAACTCCAGTACCACTTCGTCTGGTGTCCGAAGTACCGCAAGTC
GGTACTCAAAGGCGAGGTACGCCATCGACTCGAAGAACTCATCGAGGACAAAGCTAACGAACTCGACCAGGTCAAGGGCTACTC
CTCGCATCACCTCCGTGAGAAGTACGACTTTGGCTTGCCCTCGCTGTGGACGCGCTCGTACTTCGTCTCCAGTGGGGGTGACGT
CTCCAGCGAGGTCATCGAGGAGTATATCGACGCACAAGCGGGTGAATAACGATGCAACGGAACGTCTCAACCACGGTGCGGGTC
AAGCTCCACTCGCTGACCAACAGAAAATCCGATATGCTGGCCCGTGAGTACGAGGCGTTCCAACGCGAGGTTCACGGCGGGGAT
GCCGACCTCTACTCCGCGACGAAACAGCAAGCGGCCTCGGGCAAGTTTTCGAAACCGCTGTCCGAGGCGGGGGCTGTACTGGCA
CAGCCCAAAACGCAGGTCATCGTCGAACGTGACGAGGAACCTGCGAACCTCTCAATTTCTGTGGGCTCAACCCCCAGTGGAGGA
ACCCCACGGCTTTAGCCGTGGGAGGATGTCAGACGGTCTTTGGGCATGCTGATTGCCCAGTCATTATCCTCGACGACGAATACA
ACTGGTAGGTTGTGGACACTCGCGAAATTCAGCGATTCGAGGAACGCACCCTGATCGATCGCTCCCTCACCGAGGAACGCGACT
GCCACTGCGTCAGTATTGCGCTTTTTGGCCGCAAGCCCTGCCCCGGCTGCTGGTGGACATCCCTCAGCGATGATGCC (SEQ
ID NO: 812)
>3300024429|Ga0209991_10029076_1|P
CGAGAAAGCTAAGGAAGCCAGAGAAGCAGAGAAGCTAGCTCAGAAACAAGCCGAACTGGAGGCTAAAGAAAAGGCAAAGAGAGA
GGCCGAGGAGGCAAAAAGAGAGACTGAAGAAGCTAAGAAGACCAAAGCTGAAAGGATGCTAGCCGAGAAGGAAGCCGAGATAAG
CCGTCTGGAAGCGGCATTATCACGCGGAGATATACGACTGGGTAAAGTTATCTATCATTCCTGGAAGCTGGGCTCAGCACGAGC
CACTAAGGAAAAGGCCAGACGAGACGCCGAGAAAGCCAAGCAGGCCAAGGCGGCTCAGCAGTAGGCCGAGCGGGAAGCGGAGCG
GGGCGCTAAGGAGAAGGCGAAGCGAGAGGCTGAAGAGGCTAAGCAGGCACTACAATCGCTGATAGATTTTGACCAAGAGAAACA
AATTGAAGAATGTCTAAAAGAGGTGAAGAGCATTTGTGAAGAACTAAGGGCAGGGAAAGCTGAGACAAAGGAAGCAATACAAAG
GCTTTTAGATATTTCAGAAAGGATTCCCGAGTAGATATTCCCCAGCTAATATCAGTAGGCTGATGTGACTGGGCTTCATCCGTG
GCAACCTATTTGAGTTTGATAATTCACTACCTCAGTGTACATTCAGGCGGACTCCTAAAATTACAGAATCAGGCTGAGAAAGCC
CCCTGCTTCAGCGGGGGGATGAATCAGCCCTTCCCTCCTTTCCCAAAGTATACCAATATATGTTTATGGGACAAGAATATAGAC
ATAACAGACATTCGATCTCTTTGGTCAACTATCATCTCATCTGGATTCCGAGGCGTCGGAGAAAAGTATTGGTGAATCAGGTTA
AGGATAGACTTGATAAACTGCTTAGGCAAAAAGCTGAAGAGCTTGGTATAGGAGTGATAGCTTTGGAGATAAACCCAGACCATG
TTCATCTTTTTGTGAATGCTATGCCGGATTTGGCCATTCATCAAGTGGCCTTTCCTTATCGCGGTCTTTTTCTTTGCCATTCTT
GCAAACTCCACTATAATGCCGACCTTAATGGTGCCCGTAATATTCTAAAGAGGGCTTTGGACTATATGTCCTCAGCCGGGGCTG
CTTTGGCACAGCCCGTAACTCAGTCTCTGAACTGAGAATCCTCCGCCTTCAGACGGGGGAGTGTCAACTGCAGGAACATTACTG
GCAA (SEQ ID NO: 813)
>FZPS01000148_2153|M
GGGCAGAGAAGGTAGATGCAGTAGAGGCAGGAGAGGATTGGCCTACTCATGATTAAGACAGCGACATTCTACATCGCCGATATG
CCGCAGGAGGACAAGCGCCTCTGCGAACGCCTTTGCGCAGAACTCGGAGCGGCGGGCGCGACGATGGTTCGCGAGTGGTATCGC
GCCTGTGACGAAGTGACCGGCGAACGTATC (SEQ ID NO: 814)
>3300013133|Ga0172362_10039269_3|M
AAGCTGTTTCACATGGCAAGAGATTTTTGATTCGAGTCGTGCGGCCAGGTCGGGCTGATTGAAAAGAAGGAGATGGGTTTTTAT
CGCTAACTTTTACCTTAAAACTGCTTCACAACCGAAAATCGCTTAACCAAAGATGGCGAATAGAGAACTGGTGGTCGTGATGCA
GGTGCAGAAAGTCGTCAAGGGGAAGGTCGTGGGGCTGACTCACGCTAAACGCCAGATACTCGACCACGAATACGAAGGGCTCCA
GCGATTCTTGCAGGGGGATTCCAACGTTGAACTCGCCTTCAACATAGGCAGACGAGCCTTGGGGCAAGTCTCCAAGGTAGGGGC
TGTCGTGAGCCAGCCCGTAACTGGGGCAGTGCCGTTCAGCGAACTCGGTAGCGTCGTTCAATGTCCGACCCCAGAAGCCACCCT
TTTTAAAGGGTGGTAGTTCACGTGCGCGAGCGCCTGCGGCGTTTAGTCCAATCTACTAATAGGTGCTCTCCCATCTCCCTAAAT
TTCCTCGCCGCTGGAGAACGCGGGGCATAGCGAAGAACTGGGCTGCCAGCGGTCAAGCTCTCACGAACTTTATCGTCATCGGGT
TGCCACTCAATTGGTGCTTGGACAGCCCCAGTCCATGTTTCAATCAGATTCCACCCAATTGGAGCTTGCACCGTGCCAATCCAA
GTTTCAATCAGTTGCCATGCGGCAGTGACCGTGACTGTCCCAGTCCAGGTTTCGATGAGTTTCCATTCACCAGTGGCAGTGACT
GTTCCAGTCCAAGTTTCAATCTCGTACCACTGAGCAGCTGCTGGTGCTTGGACCGCCCCGGTCCATGACTCGGCGAGTTGCCAT
TCAGCCGGAGCACTTACTGTCCCAGTCCAAGAATCGATCTGCTGCCACTGTCCCGTGGTTGCATTAACAGTCCCGCTCCAAGAC
TCGACCTGACGCCACTGACCAGTGGTCGCGTTGACCGTTCCAGTCCAACTCTCAATCTGCCGCCACTGTCCCGTGGTCGCGTTC
ACAGTCCCAGTCCAGCTCTCAATCTCGTACCACTGAACAGCTGCTGGTGCTTGGACCGTCCCGGCCCATGACTCGATGAGTTGC
CATGCAGCAGGGGCGGTCACCGTGCCCGTCCAGCTCTCGACGAGCTGCCACGCGGCCGGGGCGCTCACGGTGCCAGTCCATGTT
TCGATGATCTGCCAGACTGCGGAAGCATTGACCGTCCCCATCCACGACTCCACCAATTGCCATTCAGCTGGCGCCTGAACGGTT
CCAGTCCACGTCTCTATGAGCTGCCACGCTGCAGGTGCATTAATAGTACCCGTCCATGTCTCGATCACTTGCCAGACGGCAGGC
GCTGTCACGGTCCCAGTCCAGGTTTCGATTGTTTGCCAAGCCGCGGGTGCGCTGACCGTTCCAGTCCAAGTCTCGATTAGCTGC
CATTGGGCAGGAGGTGGAACCACCGTGAACTGCCAAGTGTTTTCAGAAACATTCTCACCCGCAGCGTTGACCGCCCACACTCTC
CAGTAGTAGGTCCCCGGGGTGGAGAAGTTGCGCTGGTAGATGTTGTCGGTGTTGTCTTGGTAGTTGTCCACGAGCGGCGTGGAG
AAGGTGGGCTCGTTGTCAATCTCGATCCTATGGTTCTCCCCAAACCACCCGTTGTCCCACTCGAAGGTCACAGTTTCCCCGACC
CCGAAGACAGAGTTGTTCTCTGGACTGTAGAGCCTGGGCCTCTTCGGAAAGAATGTGTACTCGTATGTGAAAAAGATGGCACCG
GTAAGAGCGGCGCCTGTTCCCATGTCGTATTCAAAGTTGTAGGTCAGGTCGGCAAGGGTCCTATCTACAACAACGTCGATGTTG
TCTTTGTTTACAGAGATGGATGTCAAGGCCTCCCCAGAGCTGCCTGTGCTCATACTGACGGCTGAGCCCCAGTTTACCCCATCA
GCTTGAATCCTGGTCTGTCGCGTTTCCGAAGCGGTTGCACTTCCTATCCAATATGCCGTGAGGCCAACGCTCTTCACAGTCTTT
TTGTTTTCCGGGGCATAGAACGTCAGCTCCCCGCTGGTCCAAGGGTCACCGGCAGCCCCGCTGGGTTTTTGGCCCGCGGTGAAC
ATCGTGGTTTTCAGCTTTGTCGCGGCCGATGGGCGGAAGTGATAGGTGATGTGCAAAAGGCCGCTTACCTCATAGAGGTCGGAG
GCCGCAGCGCTCTGGATGTTGAGGTTCACATTGTCCCCGTTCGACCAGTTCTCCCTCATGAAGGCGCTGATGTCGTGGAAGTAG
TCGAACCCCTCTACATGCTCGCTGCCTATGTTGGTCGTGTAAGCTCTCAAGGTCTGGGTTTTCGCCCCGACGCTCGCGTACACG
CTCGTGCTGCCGTCACTAGTCAAGATGGTGTGGAAAATTTCAAAGTACGCGTTCTCGATGTTGTCCACGCGAGAGCTGTCCAGG
TCCGTCAGATAAACGGGCGTCCCGAAGGCGAACAGGTTGGCCGAGCCGTTGACGTTGGCGGCCCCCATGGCAAACGTGACTGTT
TTTATCTGGTCCGCGCTGTTGTCTGAATACTCATATGTGACGTAAGTTTCACAGCTGAGCGCATCGTTTGTTTGTCCTCCGGTA
GTAATTGTAATATCCTGATCAACGTTGTAGTTCCAGGAAGCCGTCGGCCGGGAAATATACCAGAAATTGAGATCGTTGCCGGTA
CGGGCTTGCTCTGTCCAAGCATTTGTGGTGGCTGTATCGCTTCCGATCTTGATGTTAAGAGAAAAGTCGGTTGAAGAGGCTTGG
GAAGAGTGGGCATGGATTTCGTACCAGTTGTCCCTCAGCGTGACCCCGTCTTCTGGGATTTCGATTCTGTGTGTGTAGGTCGCC
GTGCCGCCAGCCCCTATCTCGGTGTTCGTGCTCCCCACAAAATACCTGACAGTCTTGATCTTCGTGTCCGCCAGCTCGTTCTCC
TCATATGTGATGTACATCTTGGCCGTGTGGCTCTGGGTATCCGCGTCAGTGACGGTTAATTTTGGGTAGACGGCGGCCCCGTTT
GTCCAGTATGTTGTAAAAGCAGAGGTAAAATCTGCGACCACCCATGCCGCCACGCTTTCCCCGCTGTTGGCGGTGTACTGGCCG
GTCACTGGGTCTGCGTCTGGGTTCCGGTCGGTCCCCGCGATGTTCAGGGTGACGGTCATATCTGTCACGTTGGCAGCAGTCGAT
GCCCCCGTCTGGACGTGATACATCACGAACACCTTCCTGAACGGCCCAGCCTTGTCCGGGATGTAGATGGTTTTTGTCGGGGTG
AACGAGTAGGCCGTGCCAGTGCCCAAAGCGGACGATGAGGTTCCTTGCCTCGTATCCCATGAATATTGGATTGTGTTTATGGTC
ACTATATTTTCGTTGGGTTTGGTGGGGGAGGGAGTAGCCACGGCTAGGGGCTGCATCGAGATAACGAAAACGCTGGCTAACATC
ATCGCTATCAATACGAATACAAAGATTTGTTTTGCCTCCTTCCGCCCGAACTCTTCCCGCCCCAACCTAAACAAGCTACAACCC
ATCTCCCTCACCTGCTTGCCTCCACTTGGACTATGGAATGGGCGCGGCTCACGGCAGAGCCATCTCTCATCTCTCTCAGCAGGT
TCGTGAAGTACTCAATCCCGCTCGCGGTGAGCTTGCAGAGCTTTCGAGGCCTCCCCCGGGTTAAACGGGGCTC (SEQ ID
NO: 815)
>WP_121597521.1
GCGAAGCGAACGAACGAGGAGCGCAGCGAGTGTGCGCCGCCCTCGCGGCTGGGGCTTTGGCGGTGTTTTCTGTCGATCCGTTGG
CGGCTATTTATAAATGAGCAGCTGGGGCTTTGGCGGTGTTTTCTGTCGATCCGTTGGCGGCTATTTATAAATGAGCAGCTGGGG
CTTTGGCGGTGTTCCCCGCCGATCCAGAATCAGCAATTTATAAGCGAGCAGATAGGGATATAGCGGTGCTCTCTGCCATTCCGC
AGTCAGCCATTTATAAGCAGTCGGCGGTAGTTCAGTACGTCTCTTTCCCCCACCGCAGGTCGTCGTAGGTGGCCTGCTGGTCGC
TGCCGAGCCGCTCCTCGAACTTCCGGCGGAGCGCGGCCTTCTCGGTCGCGGAGATCCGCGCCAGCTCGTCCGCCTTCGAAACCG
GCTCCGGCGGGCCCAGCCCGCGACCGACGGCGACGTCGACGAGGCGCTTCGCCTGGTCGGGCGAGAACCACTCCCGCTCTAACG
ACAGCGCGACGACGAACTCCCCCTCCCCGAGCCGGTCCTGGGCCCGGGTCTTGAACGGGGCGGCGACGGCGACCTCCAGACTCA
TGTGCGAATCGGGGGGCGCCGACGGCGGTAAACCTACCGGACCGCATCCCGCTTCAGGGCGGCCGCGACGTCCGGCTTATAGCG
GTAGCGAGGCGAAAGCCCACCCGTTTACGGGTGGGATGAAGTCGACAACTGGGAATCTATCCACGCTCGTAGCCACGGCTGGGG
TTGGATGCTTGTGCAACATATTTAGGTGAAGATACTCTATATACTGACGATGCCTCGTGGGTTCGACAGGGAACGTACCAACGT
CCACAAACTCCAGTACCACTTCATCTGGTGTTCGAAATACCGTAAATCGGTGCTTGAGGGCGAGGTACGCGACCGTCTCGAAGA
ACTCATCGAGGAGAAAGCCGACGAACTCGACCAGGTCAAGGGCTACTCCTCGCGCCGACTTCGGGACGAGTTCGACTTCGGCTT
GCCGTCGCTGTGGACGCGCTCGTACTTCGTCTCAAGCGCGGGCGACGTGTCCAGCGAAGTCATCGAGGAGTACATCGACACCCA
AGCAGGTGAATAGTCATGCAACGGAACGTCTCGACCACGGTGCGAGTCAAACTCCACTCGCTGACCAACAGGAAAGCCGACCTA
CTCGCCCGCGAGTATGAGGCGTTCCAGACCGCAGTTCACGGCGGAGACGCTGACCTCTACTCCGCGACCGACCAGCAGGCGGCC
TTGGGCAAGTTCTCGAAACCGCTGTCCGAGGCGGGGGCTGTACTGGCACAGCCCGAAACGCAGGTCATCGTCCCACGTGACGAC
GAACCTGCGAACCTCTCCGTGTCCGTGGGTTCAACCCCCAGTGGGGGAACCCCACGGCTTTAGCCGTGGGAGGATGTCAGGCCC
GGCAACCGTTATGTCGGGCCAGCGAGATGGCGCACGTATGAAGACCCGCCCGCTCGGCGACACCGGCCACGACAGCACCGTCAT
GACGTTCGGCGCGATCGCGCTCAACTGGCTCGAACAGGAGGGCGCGAACCAGCTGGTCGAACACGTCCTCGACTACGGGGTCAA
TCACTTCGACGTGGCCCCG (SEQ ID NO: 816)
>3300027896|Ga0209777_10000273_32|M
TCCGGGGTGTATCTTGCTTCTGGTTTGTATGTGAATGCAGGGACCATGTCTGCGAATGTGTCTGGGAATTGGATTGAGGCGCAT
GTGATGTCTGGTGCTTTGACCATCATCTCTGGTGGCGTGTTTGTCTCTGGTTCTATCACAGTGATTTCTGGTTTGATTGGTGCG
TATGTTTCTGGTTTTGTCACTGTGCAGAGTGGTGTGATTCAGGTTCTATCTGGTGTAGGTGTTCTTACTTCTGTTTCTGGGAAT
ATTGTTTCTATTGCTTCTGGGTTGTATGTGACTATTCAGTCTGGTGGTGCTGTTTCTGTTCCTATCACTTCTGGTTCTGTGATT
GTGTCTGGGAATATTGGTGTCTCTGGCTGGGTGAGTGTGCAGAGTGGTGTGATTCAGGTTCTATCTGGTGTAGGTGTTCTTACT
TCTGTGTCTGGGAATATTGTTTCTGTCGCTTCTGGGTTGTATCTTGAATCTGGTCAAGAGATTATCTGGCGTGGTGTGCAAGTC
TCTGGCACTGTCGCTGTCTCTGGTTTGATTGGTGTGCAATCTGGTGAGGTTCATGTGATGTCTGGTGCTTTGACCATCATCTCT
GGTGGCGTGTTTGTCTCTGGTTCTATCACAGTGATTTCTGGTTTGATTGGTGCGTATGTTTCTGGTTTTGTCACTGTGCAGAGT
GGTGTGATTCAGGTTCTGTCTGGTGCGGGTGTGGTTGCTTCTGTTTCTGGGAATATTGTTTCTGTTGCTTCTGGGTTGTATCTT
GCTTCTGGGTTGTATGTGAATGCGGGGACCATGTCTGCGAATGTGTCTGGGAACTGGGTTGAGACGCATGTGATGTCTGGGAAT
CTTCAGGTTTTACAGACATCTGGTTTTGTTGCTCTTCAATCTGGTGAAATTCATATAATGAGTGGTTCAGTGACTATACCCGCA
TTGACAACAGTTGTTGCCACCCCAGCAACAAACCCCATGCTGATTACCGGTCTTTCAGGAGGACAAATTTTGACTTCAAGTGTA
GTAATAAGCGCTATTGTGAAAGCAGTATCACTAAACAGTAGTGATATGTATATTGGTGGAGCATCGGGGGTAAATAGCCCTCCG
TATTCTGGTGGAGGGTTTGTGCTTGCTCCTGGTGAAGCTATTAATCTTGATGTCGCAAATATCGGGTATGTGCGGGCCTGTGCA
GTGATGAGTGGTGATAAAGTATCATGGATTGGGATAGTATAAGAGGCAAATATGGTTAAAGAATTTCTCTTTGAACAGTTTTAC
ACAGGGACAACAGGTGTCGATACAGCGTATGGAGTAAATTGGAGGGCAACGACATTCACGATAGGGACTGTTGGCGCGAAAGCG
TCTCATTATGCGACAAGCATAGGATGGCGAGGGCAAGATTTTCCAACCATTCGTTTCAGCGATAATGTTGAAACAGTCCTTGAG
GAAAATTTCAATATCTCCGACCAAGACTTGTTTTCTATATTTCGGGCAGAAAACAACATGGTAATTTAGATTGTATACTGCGGA
ACTTGACCTGCCCATAAATCTTAAATACCTATAGGTGTATATAAGATTTGTGGCACAGAAAACCATCACCGCAAAAATCGTAGC
AATGACCGCTACGAAACAACAAATACTCCAAACCGAGTATGACAACCTCCAGCATTTTCTACAAACTGGAGAAGACCTTGGAGT
ATACTCAGCGAACAAACAACAAGCCAAAAGAACAAGTTTCAATGCCGACTACAATGGTGCATTAAATATCTTGAAGAGGGCAAC
ATCCTACATGGATATTGCTGGGGCTGTGAGTGAACCAGCCCGTGACTGGGGCAACGACGACCAGACCTCAGAAGCCACCCAACT
TTTTGAGTGGTAGTTCACTAATGTAACTGGGAATAAGAAAATCATTGAAGTATTTGGTGAACGATGGCACACTGGGGAAAAGAT
TCCATATAGACGAACTGAGATTGGGAGGAAAAAAATATTCGAAGAAAATGGGTATGCTCTTTTGATAATATGGGATTATGAATT
AATTGATGAACAAAAAGTTATAGAAAAAATAAAAGATTTTGTCTAAATTAGACAAAATTAAATCCTTCCTGTTTCGAGTACTAT
TGTTGTTGTGGTTGTGATTCCCGAGTGAGTATATGTTTTAGTAACAGTTCCATTCACAGTGACGCTTTGACTCCAATATGAACC
AGCGAGTTCGATTCCACCCACGAGCAGATGAGCGTAGAG (SEQ ID NO: 817)
>WP_121304574.1
TACCCCAACACCGGCGCCAACAGAAGCACCAACTGCGACCCCGACGCCGACTCCAACTCCAGATCCAGTAATCGTTGAAGTCGG
CGAATGGGGGAAGATAGAGCAGAACGGTACAGTGGTTCGGTTTCGAGTGGTTAGCTATGACATCACGGAATCTGTTGAAGAAGC
CGATGGAGAGACAGAAGAGCCATCTGAAGGGTATAAATTTGTAGTTGCAGACGTACATATCTCTACTGATCCCGGCAATGAAGT
TACGATTCGAAAAGACCAGTGGTCGTTTACTGAACTTACCGATAAGAAGCGCGGCCCTGATGGCGTGACCAACGGAATTAGAGA
GCCGTTCCCAAACAAGACTGCATTACAGGGTGATTCGGTTCGAGGAACTATTGTTTGGGAAGTAAAATATCCGTCTGATGGGCA
GTTCGAGGTGGAGATACATAAAAACAAAACAGGCAGGGCTGGTAAAGTGTTAATATAACAGAGTAGCTTGATAAGAGTTTTACA
TATTATCGTGGATAATTTATGCTCGAAAGGGGTTCAAAAACAGTTCTGCTCGGAGATAATTTTTGAGGGCTGACTGTAGTTGTG
GAAGTGGTCCATCGTGCCGGGTGATGCTCTGTATAATTATACCATGTAGCATCGCTAGGAGAAATTCAGCGGTTTCTTCGGGGG
AGAGAGTCACCGCCGAAGCGACCGGAGTTCCCGGCAGAAGGCCGGTGACGATGACTCGGCTATGGATGGGGCCTCTTTGATCGG
GTCACAAGACAGCCACGCTGATGCTGAACCCCAGCAGACGACGCGTGGAACGTATGCGTCTTGAAACCAACAGGCCGCTACACT
CGGCCTGAAATCCCGTGGTGGGACTCCTCCACGTTCACGCGGAGGAGGAGGTCAATTTGCCGATCTTGTTTGCACGCATTCAGT
GAGACAATGCGAGAAACCGCCCGGTTGCAGTCCAAACTACGAGAAGGTCGATACAATAGCGAGCGTATCCGGCGGTTGTACCGG
AAACAGACTCGTCGTCACGACACACCCGAGGAGCACTGTGTCATGACCTGCTGGAACAACCTGTACGCCGAGGGTATCAACATC
GTGTATATCGGTGACTTGACCGACGTGCTGGATACGCACTGGTCGGTCGAAAGCAACGCCAAGACCCAGAACTTTTGGGCGCTC
AAGAAGTTTCAGTCGATCACATCGAAAGCTCACAAACCCTTCCAGTAGAAGTTGAATCTGTGTCTACGGTGCCTGGCCAGTTCT
CGAAGTGAGACGGACAGTGAGTTTTGGCGGTGAGGAGTCGCTGTCGGCGGCGGATCGCCGCCGACGCGACAGTGTCGCCACTCA
CGCCCGCTGTCCTAGCTGGGACAACTACCTGAAGAACCGGTCGTCAAGTGGTTGGTTCGCTGGAACAGACCTGCGGACACCAAG
TGCCGTCCAAGCTGCGCGAAGCGTCATTTCGCAGAACTCGGTGAACGACCACTGTAAGAGGCGGCGCCCCCCGCGGCGGGGCGC
CGCCAGACTGCACATCCTCTCCAAGCAGACGCTTACTCTAACCCGATGTGATCGACTGAGTTTACAGCGGTAGCGAGGCGAAAG
CCCATCGGCTTTAGCCGTGGGATGAAGCCGACAACTGGGAATCTATCCACGCTTGTAGCCACGACTGGGGTTAGATGTTTGCGT
AACATCTTTAGCTGAGTGATATCTATATACTGACGATGCCTCGTGGGTTCGACAGGGAACGTACCAGCGTCCACAAACTCCAGT
ACCACTTCATCTGGTGTCCGAAATACCGTAAATCGGTGCTTGAGGGCGAGGTACGTACCCGCCTCGGGGAACTCATCGAAGAGA
AAGCCGACGAGTTCGGGCAGGTCAAGGGCTACTCCTCACGCCGACTTCGGGACGAGTTCGACTTCGGTTTGCCGTCGCTGTGGA
CGCGCTCGTACTTCGTCTCAAGTGCGGGCGACGTATCCAGCGAAGTCATCGAGGAGTACATCGACGCCCAAGCAGGTGAGTAGC
CATGAAACGGAACGTCTCAACCACGGTTCGGGCCAAACTCCACTCACTGACAAACAGAAAGACTGATCTGCTCGCCCGTGAGTA
TGAGGCGTTCCAGACTGAGGTACACGGTGGAGACGCTGACCTGTACTCTGCAACCGACCAGCAGGCGGCCTTGGGCAAGTTCTT
GAAACCGCTGTCCGAGGCGGGGGCTGTACTGGCACAGTCCGAAACGCAGGTCATCGTCCAACGCGACGACGAACCTGCGAACCT
CTCTGTTTCCGTGGATTCAACCCCCAGCGGGGGAACCCCACGGCTTTAGCCGTGTGGAGGATGTCAGAAGCGGTCTAGGAGAAT
GCCCCGGGGCTTGACCCCGGGGTTGAATCCGATAAGCAGGAGTACAAATCATTAAGTGAACATATCCCGAATCAAGAGACAGCG
ATGGAGTACAGTCACCGCTACCCCGCGTACCCAACACAAGAGGTGGCGGCTGAACTGGAACGACACATCGACGCTCATCGCCAA
GCGTACAACTACACCCTGTACAAGTACGAGAACGTGGACGCCGACAATATCGGTTCCGCGTACAAA
(SEQ ID NO: 818)
>330002794|Ga0207719_100292_34|M
ACCCTGAGCCTAGGCGTCGTCGGCGTGATCGCCGGCCCGCTCGCCATCGCCCTGCTCGTCGAAGTGGTCGAACTGATCACCGAC
GAACGGGTCAGCATCCAGCAGACCTTCCAGGAGAGCGCCACCGAGGCCGCCGGCGACGACGACTGAGCGGCGGCCGTACCGACG
CGAGTGCGGGCGGCGTTACAGCGGTAGCGAGGCGAAAGCTCACCCGTTTACGGGTGGGATGAAGCCGACAATTGGGAATCTATC
CACGTTCGTAGCCGCGGCTGGGGTTGGATACTTGCATAACATCTTTAGGTGAATAGTATCTATATACTGACGATGCCTCGTGGG
TTCGACAGGGAACGTACCAGCGTCCACAAACTCCAGTATCACTTCATTTGGTGTCCGAAGTACCGCAAATCGGTGCTTGAGGGT
GAGGTACGTGACCGTCTCGAAGAACTCATTGAGGAGAAAGGAGACGAACTCGGCCAGGTCAAGGGCTACTCCTCGCGCCACCTC
CGCGACGAGTTCGACTTCGGTCTTCCCTCGCTGTGGACGCGCTCGTACTTCGTCTCAACTGCGGGCGACGTATCCAGCGAAGTC
ATCGAGGAGTACATCGACGCCCAAGCAGGTGAGTAGTCTTGCAACAAACCGTCTCGACCACGGTGCGGGTCAAACTCCCCTCGC
TGACCAACAGGAAGGCAGACCTGCTCGCCCGTGAGTACGAGGCGTTCCAGACCGAAGTTCACGGCGGCGATGCTGACCTCTACT
CCGCGACTAAGCAACAGGCGGCCTTGGGCAAGTTCTCGAAACCGCTGTCCGAGGCGGGGGCTGTACTGGCACAGTCCGAAACGC
AGGTCATCGTCCACCGTGACGAGGAACCTGCGAACCTCTCCGTATCCGTGGATTCAACCCCCAGTGGGGGAACCCCACGGCTTT
AGCCGTGGGAGGATGTCAGTCGCCCGTCTCGGGTTCGCGCCCCGCGGCCTTCCACTCGGTCAGACTCCCCTCGTAGAAGGCGAG
GTTCTCGTACCCGAGGTGTCGGAGGACGACGTAGGTGTGACTGATCCGGCGAGCGGTGTTGCAGTACAGCAGAACGCGCCGGGT
CGCTGAGCGGGATATTCTCACTCTCCGCACCGCCCGCGAGAATAGGGCCGCGCTCAGTCGACCACGCAAGCGCGAGCGCGCCTC
GCCCTTTCAGTCCACCAGGACCGCACCGCTCCGCCCCGCACCGCCACCGCAGACAGCCTCACACCTCCCCAGCCTCCTCGCGTC
TCGTCGCTCGCGTGACTCGCTCCTCGGTGCTCGTCCCTCGCACGGTGCGTCGCGGCACGGAGGCCGCGACGGCGCGCGCCACCG
CAATCGATCGGTGTCGGAACGGCCGCGAACGCACCTCTCAAGAGCCTGCGGGCCGTGGCGATCGGTAATGAGCGACACCGGCGG
CCCACTCTCACCGGACAGACCGGACGCCGAGAGCGATTTCCGGGTGGACGCCCCCTTCGACCCCGCGGGCGACCAGCCCGAGGC
CATCGAGCAACTGGTCGACGGCTTCGAACGCCAGGGCCACGACAAACAG
  (SEQ ID NO: 819)
>SRR8526178_megahit_k177_763700_3|P
ATGGTCACGGTTCGGATCAATGAAGTCACCAAGTCAAAGCTCGACAAGTTGTGCGAGGACAACGGCCTCAAGATGCGGTGGGTT
GTTGAACAGGCGATCCTTCAATATTGTGAGATGCACGAGTCGAAACATCGTCCAGAGGATGGGTAACTTATGTCACTCAAAACA
CTCACATTCTGGCCGATTGGTATGTCTGCAAAATACAGGCGGATATTTGACAACATCCGTAAGCAACTTGGGGCGGCGCAGCGC
GAAATGGTGAAAGCATGGCTACGGCTGGCGTTGGCAGAGGATGCTTATGGTGACCTTAATGCTGCGAATAACATCGCGCGGGGG
ATGCAGACGTTTGGGCCTTGTGCCAAGTCCTCTGCGTCAGACGACGCTATCGGGCTGCGGTTCGATAGCGAGGGGCAAGAATCT
GCCCTGGGGCAGGCGAAGCGATTGTTTGCTTGAGCTTGCAAGTTCTTGTGTGTGTGTGGGTATGAACTGCTGAGCGTTTGTGTA
GT (SEQ ID NO: 820)
>3300028675|Ga0272445_1001731_11|M
GTCGTAACGATGGCTGATGTGTTAGAGGGAGGGGCTGTGGGGATCAATGACAATAAAATGAACACTCTCGTATTAATGCATGCT
AACCCACTATGGGGCGAGATTGAGATAAAAACTCCCGCAGGGCGAACGGTTTGGCGTGCTCCTTAACCGTTGGTGACCTGAATG
TGGGAAACAATCTTGATTGGCGTTTGTGGGGCGCACTTTCCCGCTACCGTAGGGGCGACAAAAAGCAGCACTATTCTGGCTTTC
CGTCGCCATCATCGCTATCATCGCTCTCATAGCCATCAACACTTTGACCGTCCGCTGGCTCGGTCATCCGCCACAAAACTCATC
CACAACAATAGCACTGTCAGAGTGAAAGGACTTAGCAGCGTTCGTTAAAGCGCCGACCTGCAGCGCCGAAAGACACTTGCTAAG
CCTTACCGTCGGCTTGGTCACTTCCCGTTTCCCGTAGCGCGTGAAGCCAGAATGGTAAAGCCTAAAATGCCGTTTTTGCGTTGC
GACAACGCGCAAGTTAGCGTCAGCAGGCGCACATAGGCACAGGCGCACGGGCGTAGGCACGCAGGCGCACGCACGCGGGCACGG
GCGCGCTTTCAACGGGGATACCCGAGCGCGCAGGCGGGTCAGGCTGCCCGCCGACCTTAAAGTCAACCTTAAAGACTACAACCC
CCAAACCGACGCTATGTGCGCTATGCTTTGGGACGCTTATAAAGTTCAGGTGCTTAAGGAACTTGTTGGCGAGGATGAGGGCGA
CTACATTAAGTAAAGCCGTGAGGAGTTATTAGAGGCTTTGCGGGAACGGGAGCACAAGTATGGTTATAAAGCGCCCCTTAATGC
GAACTTAACAAAACCGTCCCGACCAGTTATTTCGGGTAAAATTTTAACCCATTTGCCCAAATTCCGCAACTTCGTTGCAGCAAA
CCTCCAGTCACCCCTTTCCCCTAAGGGGTTTGGCGCAAGCAATTCTTGAAATTCCTGCCAAAATCGGCAAAATTCAAAGGTCCC
GTTCTTTGATGCCTATCACGGCAGAATAAAGGGGGAGGTTGACGGCAAATGAAAAAAGTGGTCATAACCATCACTACTGGAGTA
GAGTTTCTACAACCTCAAGATGAGCAAATCGTGAGGAAGGCAGCGGAATGGTATACAAAGGCACGAGAAGCCCTTTTTGCCCAT
GCCCTCCAACAACAACAAGGTAAAGTTGAGGGAAACCGATTTTGTTGCACAAAGTGTAAATTTCAGCACAATGCGGACTTTGTG
GCGGCGTATAACATTGCCGTAAGGGCATTGAAGAAGTTAGGGATGAGGGAAGAGATAGGTTGGAAGGTATTGACAGGCAAGCCG
AAGGTGTTATAATGACGATGGCTCATGGGGAGCAGGCTCCCCATGGGCAGCGTGCCCGCCGAAAGGTGGGTGGAGGGCAGAGCC
TGTCTGCCTGTAAGCAGCACCTTCCCACATGGGGAGGTTGTCTGCAAGTTCACATTATCCCCTGACCCCAGCGGTGAAGAGCCG
CTGGGGTTTCAATTGTCTTAGCACCCTGATGTCCACATTAACCCCTTAAGACAGAAAACTTGCCCAAGCGAGGATTAGCACGAA
CTATTGCCTTGTAACGCTCCCCTTAGCAGTTGCACATTGCAAAGCAAGTTTCTTGGCATTAAGAGACTCTTTCAGTCCCACAAT
GGTTTGATTGCTACATTGCCTGCCAAGATAAAGCCCTTCCTTTCCATTATCACTTGTAAAGGACCAGTGTCATAATTCCTCAGG
GGTGAGGGAGATGAAGGTCATTATTGGGCGTGTAATGGAAGACACTTACACGGTCAAAAGTCAAGAACCCTTGCCACCAGGACA
GGAAGTCTTCATTGTAACTAAGATGGACGCTGAGGATGTCTATTACCTTGCAAAAACTTTGGCGTGG
(SEQ ID NO: 821)
```

### Example 6—Functional Validation of Engineered CLUST.196682 CRISPR-Cas Systems (FIGS. 13A, 13B, and 14)

[0265] Having identified the minimal components of CLUST.196682 CRISPR-Cas systems, we selected one loci for functional validation, from the metagenomic source designated 3300025638.

### DNA Synthesis and Effector Library Cloning

[0266] To test the activity of an exemplary CLUST.196682 CRISPR-Cas system, we designed and synthesized systems containing the pET28a(+) vector. Briefly, E. coli codon-optimized nucleic acid sequences encoding the CLUST.196682 3300025638 effector (amino acid sequence provided as SEQ ID NO: 601 in TABLE 8) were synthesized (Genscript) and cloned into a custom expression system derived from the pET-28a(+) (EMD-Millipore). The vector included a nucleic acid encoding CLUST.196682 3300025638 effector protein under the control of a lac promoter and an E. coli ribosome binding sequence. The vector also included an acceptor site for a CRISPR array library driven by a J23119 promoter following the open reading frame for the CLUST.196682 3300025638 effector.

[0267] We computationally designed an oligonucleotide library synthesis (OLS) pool containing “repeat-spacer-repeat” sequences, where “repeat” represents the consensus direct repeat sequence found in the CRISPR array associated with the effector, and “spacer” represents sequences tiling the pACYC184 plasmid as well as E. coli essential genes. The spacer length was determined by the mode of the spacer lengths found in the endogenous CRISPR array. The repeat-spacer-repeat sequence was appended with restriction sites enabling the bi-directional cloning of the fragment into the aforementioned CRISPR array library acceptor site, as well as unique PCR priming sites to enable specific amplification of a specific repeat-spacer-repeat library from a larger pool.

[0268] We next cloned the repeat-spacer-repeat library into the plasmid using the Golden Gate assembly method. Briefly, we first amplified each repeat-spacer-repeat from the OLS pool (Agilent Genomics) using unique PCR primers, and pre-linearized the plasmid backbone using BsaI to reduce potential background. Both DNA fragments were purified with Ampure XP (Beckman Coulter) prior to addition to Golden Gate Assembly Master Mix (New England Biolabs) and incubated per the manufacturer's instructions. We further purified and concentrated the Golden Gate reaction to enable maximum transformation efficiency in the subsequent steps of the bacterial screen.

[0269] The plasmid library containing the distinct repeat-spacer-repeat elements and Cas proteins was electroporated into E. Cloni electrocompetent E. coli (Lucigen) using a Gene Pulser Xcell® (Bio-rad) following the protocol recommended by Lucigen. The library was either co-transformed with purified pACYC184 plasmid, or directly transformed into pACYC184-containing E. Cloni electrocompetent E. coli (Lucigen), plated onto agar containing chloramphenicol (Fisher), tetracycline (Alfa Aesar), and kanamycin (Alfa Aesar) in BioAssay® dishes (Thermo Fisher), and incubated for 10-12 hours at 37° C. After estimation of approximate colony count to ensure sufficient library representation on the bacterial plate, the bacteria were harvested and plasmid DNA extracted using a QIAprep Spin Miniprep® Kit (Qiagen) to create an “output library.” By performing a PCR using custom primers containing barcodes and sites compatible with Illumina sequencing chemistry, we generated a barcoded next generation sequencing library from both the pre-transformation “input library” and the post-harvest “output library,” which were then pooled and loaded onto a Nextseq 550 (Illumina) to evaluate the effectors. At least two independent biological replicates were performed for each screen to ensure consistency.

### Bacterial Screen Sequencing Analysis

[0270] Next generation sequencing data for screen input and output libraries were demultiplexed using Illumina bcl2fastq. Reads in resulting fastq files for each sample contained the CRISPR array elements for the screening plasmid library. The direct repeat sequence of the CRISPR array was used to determine the array orientation, and the spacer sequence was mapped to the source (pACYC184 or E. Cloni) or negative control sequence (GFP) to determine the corresponding target. For each sample, the total number of reads for each unique array element (rₐ) in a given plasmid library was counted and normalized as follows: (rₐ+1)/total reads for all library array elements. The depletion score was calculated by dividing normalized output reads for a given array element by normalized input reads.

[0271] To identify specific parameters resulting in enzymatic activity and bacterial cell death, we used next generation sequencing (NGS) to quantify and compare the representation of individual CRISPR arrays (i.e., repeat-spacer-repeat) in the PCR product of the input and output plasmid libraries. We defined the array depletion ratio as the normalized output read count divided by the normalized input read count. An array was considered to be “strongly depleted” if the depletion ratio was less than 0.1 (more than 10-fold depletion). When calculating the array depletion ratio across biological replicates, we took the maximum depletion ratio value for a given CRISPR array across all experiments (i.e. a strongly depleted array must be strongly depleted in all biological replicates). We generated a matrix including array depletion ratios and the following features for each spacer target: target strand, transcript targeting, ORI targeting, target sequence motifs, flanking sequence motifs, and target secondary structure. We investigated the degree to which different features in this matrix explained target depletion for CLUST.196682 systems, thereby yielding a broad survey of functional parameters within a single screen.

[0272] FIGS. 13A-B depict the location of strongly depleted targets for CLUST.196682 3300025638 effector targeting pACYC184 and E. coli E. Cloni essential genes. Notably, the location of strongly depleted targets appears dispersed throughout the potential target space for E. Cloni essential genes.

[0273] FIG. 14 depicts a weblogo of the sequences flanking depleted target, indicating a prominent 5′ PAM of CG.

### Example 7—Identification of Minimal Components for CLUST.089537 CRISPR-Cas System (FIGS. 15-18)

[0274] This protein family describes a large single effector associated with CRISPR systems found in Phycisphaerales and Planctomycetes organisms, and uncultured metagenomic sequences collected from freshwater, permafrost, sediment, soil, anaerobic, and hot springs environments (TABLE 11). CLUST.089537 effectors include the examples of proteins detailed in TABLES 11 and 12, below. Examples of direct repeat sequences for these systems are shown in TABLE 13.
[0275] Examples of naturally occurring loci containing this effector complex are depicted in FIG. 15, indicating that for CLUST.089537 loci, the effector protein co-occurs with a CRISPR array. No other families of large proteins were identified within a bi-directional 15 kb window that co-occur with the effector protein or a CRISPR array.
[0276] The direct repeat sequence of CLUST.089537 exhibit multiple conserved motifs, including 5′-RBBNRBKGACAS-3′ (SEQ ID NO: 834) proximal to the 3′ end (FIG. 16), where R refers to A or G, B refers to C or G or T or U, K refers to G or T or U, S refers to C or G, and N refers to any nucleobase.
[0277] FIG. 17 is a schematic representation of a phylogenetic tree of CLUST.089537 effectors, showing that the family exhibits sequence diversity.
[0278] FIG. 18 is a schematic representation of a multiple sequence alignment of CLUST.089537 effector proteins revealing the location of the conserved catalytic residues of the RuvC domain, indicated by the colors Magenta, Blue, and Red.
[0279] Optionally, the system includes a tracrRNA that is a subset of a non-coding sequence listed in TABLE 14.

TABLE 11
Representative CLUST.089537 Effector Proteins

| | | # | | | effector |
|---|---|---|---|---|---|
| species | effector accession | spacers | cas1 | cas2 | size |
| bioreactor metagenome | CAAACX010000652_2\|M | 7 | Y | N | 674 |
| (CAAACX010000652) | | | | | |
| activated sludge metagenome | CAAACH010011569_2\|M | 3 | Y | Y | 759 |
| (CAAACH010011569) | | | | | |
| activated sludge metagenome | CAAACI010012331_3\|M | 2 | Y | Y | 759 |
| (CAAACI010012331) | | | | | |
| activated sludge metagenome | UZXW01002767_11\|M | 2 | Y | N | 758 |
| (UZXW01002767) | | | | | |
| aquatic-freshwater-freshwater lake | 3300009161\|Ga0114966_10008307_8\|M | 4 | Y | N | 728 |
| (3300009161\|Ga0114966_10008307) | | | | | |
| aquatic-freshwater-freshwater lake | 3300009161\|Ga0114966_10008307_7\|P | 4 | Y | N | 762 |
| (3300009161\|Ga0114966_10008307) | | | | | |
| aquatic-freshwater-freshwater lake | 3300010885\|Ga0133913_10083255_2\|P | 4 | Y | N | 762 |
| (3300010885\|Ga0133913_10083255) | | | | | |
| aquatic-freshwater-freshwater lake | 3300020109\|Ga0194112_10008260_1\|P | 2 | Y | N | 676 |
| (3300020109\|Ga0194112_10008260) | | | | | |
| aquatic-freshwater-freshwater lake | 3300020109\|Ga0194112_10008260_1\|M | 2 | Y | N | 678 |
| (3300020109\|Ga0194112_10008260) | | | | | |
| aquatic-freshwater-freshwater lake | 3300020222\|Ga0194125_10021011_3\|M | 4 | Y | N | 687 |
| (3300020222\|Ga0194125_10021011) | | | | | |
| aquatic-freshwater-freshwater lake | 3300027770\|Ga0209086_10006474_1\|P | 3 | Y | N | 762 |
| (3300027770\|Ga0209086_10006474) | | | | | |
| aquatic-freshwater-freshwater | 3300015360\|Ga0163144_10184575_1\|M | 2 | Y | N | 779 |
| microbial mat | | | | | |
| (3300015360\|Ga0163144_10184575) | | | | | |
| aquatic-freshwater-sediment | 3300013130\|Ga0172363_10020541_1\|M | 27 | Y | N | 761 |
| (3300013130\|Ga0172363_10020541) | | | | | |
| aquatic-freshwater-sediment | 3300013133\|Ga0172362_10044703_1\|M | 8 | Y | N | 654 |
| (3300013133\|Ga0172362_10044703) | | | | | |
| aquatic-freshwater-sediment | 3300031862\|Ga0315280_10005430_2\|M | 4 | Y | N | 710 |
| (3300031862\|Ga0315280_10005430) | | | | | |
| aquatic-freshwater-sediment | 3300031952\|Ga0315294_10035890_2\|P | 12 | Y | N | 691 |
| (3300031952\|Ga0315294_10035890) | | | | | |
| aquatic-freshwater-sediment | 3300031952\|Ga0315294_10041214_2\|M | 2 | Y | N | 741 |
| (3300031952\|Ga0315294_10041214) | | | | | |
| aquatic-freshwater-sediment | 3300031952\|Ga0315294_10041214_2\|P | 2 | Y | N | 745 |
| (3300031952\|Ga0315294_10041214) | | | | | |
| aquatic-freshwater-sediment | 3300031952\|Ga0315294_10058002_1\|M | 7 | Y | N | 794 |
| (3300031952\|Ga0315294_10058002) | | | | | |
| aquatic-freshwater-sediment | 3300032046\|Ga0315289_10071835_2\|M | 3 | Y | N | 727 |
| (3300032046\|Ga0315289_10071835) | | | | | |
| aquatic-freshwater-sediment | 3300032053\|Ga0315284_10046226_2\|P | 7 | Y | N | 740 |
| (3300032053\|Ga0315284_10046226) | | | | | |
| aquatic-freshwater-sediment | 3300032069\|Ga0315282_10002412_8\|P | 6 | Y | N | 744 |
| (3300032069\|Ga0315282_10002412) | | | | | |
| aquatic-freshwater-sediment | 3300032118\|Ga0315277_10001015_12\|P | 3 | Y | Y | 796 |
| (3300032118\|Ga0315277_10001015) | | | | | |
| aquatic-freshwater-sediment | 3300032118\|Ga0315277_10012802_3\|M | 6 | Y | N | 759 |
| (3300032118\|Ga0315277_10012802) | | | | | |
| aquatic-marine-deep subsurface | 3300009499\|Ga0114930_10003500_21\|M | 2 | Y | N | 702 |
| (3300009499\|Ga0114930_10003500) | | | | | |
| aquatic-marine-deep subsurface | 3300011118\|Ga0114922_10000510_27\|M | 3 | Y | N | 736 |
| (3300011118\|Ga0114922_10000510) | | | | | |
| aquatic-non marine saline and | 3300017960\|Ga0180429_10052609_1\|M | 3 | Y | N | 679 |
| alkaline-hypersaline lake sediment | | | | | |
| (3300017960\|Ga0180429_10052609) | | | | | |
| aquatic-non marine saline and | 3300017963\|Ga0180437_10045654_1\|M | 13 | Y | N | 741 |
| alkaline-hypersaline lake sediment | | | | | |
| (3300017963\|Ga0180437_10045654) | | | | | |
| aquatic-non marine saline and | 3300017971\|Ga0180438_10003700_2\|P | 16 | Y | N | 741 |
| alkaline-hypersaline lake sediment | | | | | |
| (3300017971\|Ga0180438_10003700) | | | | | |
| aquatic-non marine saline and | 3300017991\|Ga0180434_10065880_1\|P | 4 | Y | N | 762 |
| alkaline-hypersaline lake sediment | | | | | |
| (3300017991\|Ga0180434_10065880) | | | | | |
| aquatic-non marine saline and | 3300017992\|Ga0180435_10008274_7\|P | 14 | Y | N | 670 |
| alkaline-hypersaline lake sediment | | | | | |
| (3300017992\|Ga0180435_10008274) | | | | | |
| aquatic-non marine saline and | 3300018080\|Ga0180433_10080815_1\|M | 4 | Y | N | 762 |
| alkaline-hypersaline lake sediment | | | | | |
| (3300018080\|Ga0180433_10080815) | | | | | |
| aquatic-thermal springs-hot spring | 3300009503\|Ga0123519_10002165_1\|M | 4 | Y | Y | 792 |
| (3300009503\|Ga0123519_10002165) | | | | | |
| bioreactor metagenome | CAAACB010000011_94\|M | 12 | Y | N | 789 |
| (CAAACB010000011) | | | | | |
| bioreactor metagenome | SRR5251193_megahit_k177_201695_120\|P | 8 | Y | N | 679 |
| (SRR5251193) | | | | | |
| bioreactor metagenome | SRR5251487_megahit_k177_199995_1\|P | 5 | Y | N | 679 |
| (SRR5251487) | | | | | |
| bioreactor metagenome | SRR5576005_megahit_k177_1292294_1\|M | 8 | Y | N | 789 |
| (SRR5576005) | | | | | |
| bioreactor metagenome | U0UK01008448_2\|M | 3 | Y | Y | 757 |
| (U0UK01008448) | | | | | |
| bioreactor metagenome | U0UL01003058_1\|M | 2 | Y | Y | 769 |
| (U0UL01003058) | | | | | |
| bioreactor-anaerobic-anaerobic | 3300009652\|Ga0123330_1010394_3\|M | 2 | Y | Y | 769 |
| biogas reactor | | | | | |
| (3300009652\|Ga0123330_1010394) | | | | | |
| bioreactor-switchgrass degrading | 3300012949\|Ga0153798_10025413_2\|P | 13 | Y | N | 638 |
| (3300012949\|Ga0153798_10025413) | | | | | |
| cave metagenome (SRR7811943) | SRR7811943_megahit_k177_406423_2\|M | 3 | Y | N | 778 |
| freshwater metagenome | SRR5818194_megahit_k177_802550_7\|M | 4 | Y | N | 728 |
| (SRR5818194) | | | | | |
| freshwater metagenome | SRR5818194_megahit_k177_802550_6\|P | 4 | Y | N | 762 |
| (SRR5818194) | | | | | |
| freshwater sediment metagenome | SRR6481359_megahit_k177_1860565_4\|M | 6 | Y | Y | 743 |
| (SRR6481359) | | | | | |
| hot springs metagenome | SRR6049666_megahit_k177_256604_1\|P | 4 | Y | N | 792 |
| (SRR6049666) | | | | | |
| hydrothermal vent metagenome | SRR2080392_megahit_k177_207267_1\|M | 4 | Y | N | 785 |
| (SRR2080392) | | | | | |
| hydrothermal vent metagenome | SRR2080392_megahit_k177_207267_2\|P | 4 | Y | N | 742 |
| (SRR2080392) | | | | | |
| lab enrichment-defined media-ionic | 3300025517\|Ga0207869_1001046_11\|M | 6 | Y | N | 674 |
| liquid and high solid enriched | | | | | |
| (3300025517\|Ga0207869_1001046) | | | | | |
| lab enrichment-defined media-ionic | 33000255721Ga0207864_1000213_47\|M | 7 | Y | N | 674 |
| liquid and high solid enriched | | | | | |
| (3300025572\|Ga0207864_1000213) | | | | | |
| lab enrichment-defined media-ionic | 33000255721Ga0207864_1014515_2\|P | 3 | Y | N | 679 |
| liquid and high solid enriched | | | | | |
| (3300025572\|Ga0207864_1014515) | | | | | |
| lab enrichment-defined media-ionic | 33000255721Ga0207864_1014515_3\|M | 3 | Y | N | 638 |
| liquid and high solid enriched | | | | | |
| (3300025572\|Ga0207864_1014515) | | | | | |
| permafrost metagenome | SRR6505097_megahit_k177_377355_35\|M | 7 | Y | N | 784 |
| (SRR6505097) | | | | | |
| permafrost metagenome | SRR6962291_megahit_k177_1754533_5\|M | 3 | Y | N | 722 |
| (SRR6962291) | | | | | |
| permafrost metagenome | SRR6962291_megahit_k177_1754533_5\|P | 3 | Y | N | 762 |
| (SRR6962291) | | | | | |
| permafrost metagenome | SRR6962291_megahit_k177_3367137_15\|M | 12 | Y | N | 735 |
| (SRR6962291) | | | | | |
| permafrost metagenome | SRR6962291_megahit_k177_3367137_14\|P | 12 | Y | N | 760 |
| (SRR6962291) | | | | | |
| Phycisphaerae bacterium ST- | AQT69685.1 | 13 | Y | N | 747 |
| NAGAB-D1 (CP019791) | | | | | |
| Phycisphaerales bacterium | PMBN01000097_4\|M | 3 | Y | N | 784 |
| (PMBN01000097) | | | | | |
| Phycisphaerales bacterium | PMDC01000375_4\|M | 7 | Y | N | 784 |
| (PMDC01000375) | | | | | |
| Phycisphaerales bacterium | PMMM01000072_9\|M | 7 | Y | N | 784 |
| (PMMM01000072) | | | | | |
| Planctomycetes bacterium | QBM02859.1 | 19 | Y | Y | 743 |
| RBG_13_46_10 (MHYD01000012) | | | | | |
| sediment metagenome | SRR6963308_megahit_k177_1876783_1\|M | 8 | Y | N | 679 |
| (SRR6963308) | | | | | |
| sediment metagenome | SRR6963352_megahit_k177_1225001_5\|P | 12 | Y | N | 762 |
| (SRR6963352) | | | | | |
| sediment metagenome | SRR6963480_megahit_k177_1813084_1\|M | 5 | Y | N | 762 |
| (SRR6963480) | | | | | |
| sediment metagenome | SRR6963491_megahit_k177_4304123_3\|P | 17 | Y | N | 670 |
| (SRR6963491) | | | | | |
| sediment metagenome | SRR6963587_megahit_k177_2272343_29\|M | 16 | Y | N | 741 |
| (SRR6963587) | | | | | |
| sediment metagenome | SRR6963591_megahit_k177_1621237_2\|P | 16 | Y | N | 741 |
| (SRR6963591) | | | | | |
| sediment metagenome | SRR8554444_megahit_k177_608234_1\|M | 6 | Y | Y | 792 |
| (SRR8554444) | | | | | |
| soil metagenome (SRR4030068) | SRR4030068_megahit_k177_2163203_10\|M | 2 | Y | N | 754 |
| soil metagenome (SRR5487326) | SRR5487326_megahit_k177_254484_5\|M | 3 | Y | Y | 767 |
| soil metagenome (SRR5487761) | SRR5487761_megahit_k177_404752_1\|M | 3 | Y | N | 767 |
| soil metagenome (SRR8554485) | SRR8554485_megahit_k177_439309_3\|P | 8 | Y | N | 767 |
| soil metagenome (SRR8554511) | SRR8554511_megahit_k177_4512460_1\|M | 2 | Y | N | 669 |
| soil metagenome (SRR8554511) | SRR8554511_megahit_k177_1767604_11\|P | 8 | Y | N | 744 |
| soil metagenome (SRR8554643) | SRR8554643_megahit_k177_4328113_1\|P | 3 | Y | N | 669 |
| soil metagenome (SRR8554643) | SRR8554643_megahit_k177_1281129_3\|P | 5 | Y | N | 740 |
| soil metagenome (SRR8554643) | SRR8554643_megahit_k177_1281129_3\|M | 5 | Y | N | 706 |
| subsurface metagenome | SRR6056591_megahit_k177_2733919_1\|P | 3 | Y | N | 736 |
| (SRR6056591) | | | | | |
| terrestrial metagenome | SRR6263259_megahit_k177_232832_6\|M | 2 | Y | N | 758 |
| (SRR6263259) | | | | | |
| terrestrial-soil | 3300031539\|Ga0307380_10018846_3\|P | 5 | Y | N | 740 |
| (3300031539\|Ga0307380_10018846) | | | | | |
| terrestrial-soil | 3300031539\|Ga0307380_10018846_4\|M | 5 | Y | N | 706 |
| (3300031539\|Ga0307380_10018846) | | | | | |
| terrestrial-soil | 3300031539\|Ga0307380_10072822_2\|M | 3 | Y | N | 669 |
| (3300031539\|Ga0307380_10072822) | | | | | |
| terrestrial-soil | 3300031539\|Ga0307380_10072822_2\|P | 3 | Y | N | 691 |
| (3300031539\|Ga0307380_10072822) | | | | | |
| terrestrial-soil | 3300031566\|Ga0307378_10072489_1\|M | 4 | Y | N | 669 |
| (3300031566\|Ga0307378_10072489) | | | | | |
| terrestrial-soil | 3300031566\|Ga0307378_10072489_2\|P | 4 | Y | N | 691 |
| (3300031566\|Ga0307378_10072489) | | | | | |
| terrestrial-soil | 3300031670\|Ga0307374_10070813_2\|P | 6 | Y | N | 767 |
| (3300031670\|Ga0307374_10070813) | | | | | |
| terrestrial-soil | 3300031965\|Ga0326597_10006968_2\|P | 12 | Y | N | 698 |
| (3300031965\|Ga0326597_10006968) | | | | | |
| terrestrial-soil-compost | 3300017540\|Ga0180217_1000254_36\|M | 8 | Y | N | 687 |
| (3300017540\|Ga0180217_1000254) | | | | | |
| terrestrial-soil-fen | 3300014494\|Ga0182017_10000840_9\|P | 7 | Y | N | 784 |
| (3300014494\|Ga0182017_10000840) | | | | | |
| terrestrial-soil-fen | 3300014839\|Ga0182027_10004505_3\|M | 21 | Y | N | 735 |
| (3300014839\|Ga0182027_10004505) | | | | | |
| terrestrial-soil-fen | 3300014839\|Ga0182027_10004505_2\|P | 21 | Y | N | 760 |
| (3300014839\|Ga0182027_10004505) | | | | | |
| terrestrial-soil-hardwood forest soil | 3300031715\|Ga0307476_10010105_2\|P | 3 | Y | Y | 768 |
| (3300031715\|Ga0307476_10010105) | | | | | |
| terrestrial-soil-hardwood forest soil | 3300031715\|Ga0307476_10010105_1\|M | 3 | Y | Y | 699 |
| (3300031715\|Ga0307476_10010105) | | | | | |

TABLE 12
Amino acid sequences of Representative CLUST.089537 Effector Proteins

>CAAACX010000652_28|M
[bioreactor metagenome]
MGVKAWKAKIIVADPDLAAALDHTVRQWNLWAEQACIAIMRLRRGDYGDEGQAVWRFLSEKGTFGTSILDKITRVTGRGIKNDE
ERTIASNFLSRHGPFEPLRAARDALGPNFWYQFQRAVRERIESHDAKLRQWREDHAEWIETRRTWEEEHRAYMNVRPVIEAFEA
AEGQSGRRRGRWRRWLDFLSSHPELAAWRGGPATIVPLSKEELAACRRRRRRAVAEQARLFFEKNPELRALNREHDEYQEKFAR
PWAKRRNPDGFRHRPTFTLPHPDSHPDWPRFKGNAGWRDLSVPDRTVSLELLCPDGSRRWFNVRFVPDPRLASLRPATQPVRQG
NTTYHYVSDALGVAEQPVQPQGIKLILRPDGAYLSVSVSVLAPPCGFDVRQSAIEKYGSIWACRKYKQDHPDRPLVTCAVDLAV
RHNGALTVARDGEVFARRLLHNRFFLPGDDRERAMNIPSLLEIAAVKRQLRRARRQTGRIAPGKPSCARLQAHYRALCEDRYKK
LVAAIFAYARHHGAEVVIFEDLKNLLPNAVNERGVNRALQSWNRGAIVRFARQSAEDVGLRVATVPAFHTSIVCARCGALGCRF
EQTREGVRIAKLGPWFGCRACGRRIHADLNASENLHKVLIGTFPQVRRISRDPPVLSIADVRVDQREADRLAAAWLSELSVGPT
PF (SEQ ID NO: 301)
>CAAACH010011569_2|M
[activated sludge metagenome]
MQLWRTHCVFNQRLPALLKRLFAMRRGEVGGNEAQRQVYQRVAQFVLARDAKDSVDLLNAVSLRKRSANSAFKKKATISCNGQA
REVTGEEVFAEAVALASKGVFAYDKDDMRAGLPDSLFQPLTRDAVACMRSHEELVKTWEKEYQEWRDRKSEWEAEPEHARYLNL
RPKFEEGEAARGGRFRKRAERDHAYLDWLEANPQLAAWRGKAPPAVVPIDEAGKRRIARAKAWKQASVRAEEFWKRNPELHALH
KIHVQYLREFVRFKQRPTFTMPDPVHHPRWCLFNAPQTSPQGYRLLRLPQSRRTVGSVELRLLTGPSDGAGFPDAWVNVRFKAD
PRLAQLRPVKVPRTVTRGKNKGAKVEADGFRYYDDQLLIERDAQVSGLKLLFRDIRMAPFADKPIEDRLLSATPYLVFAVKIKD
EARTERAKAIRFDETSELTKSGKKQKSKTLPAGLVSVAVDLDTRGVGFLTRAVIGVPEIQQTHHGVRLLQSRYVAVGQVEARAS
GEAEWSPGPDLAHIARHKREIRRLRQLRGKPVKGERSHVRLQAHIDRMGEDRFKKAARKIVNEALRGSNPAAGDPYTRADVLLY
ESLETLLPDAERERGINRALLRWNRAKLIEHLKRMCDDAGIRHFPVSPFGTSQVCSKCGALGRRYSLARENGRAVIRFGWVERL
FACPNPECPGRRPDRPDRPFTCNSDHNASVNLHRVFALGDQAVAAFRALPPRDSTARTLAVKRVEDTLRPQLMRLHKLADAGVD
SPF (SEQ ID NO: 302)
>CAAACI010012331_3|M
[activated sludge metagenome]
MQLWRTHCVFNQRLPALLKRLFAMRRGEVGGNEAQRQVYQRVAQFVLARDAKDSVDLLNAVSLRKRSANSAFKKKATISCNGQA
REVTGEEVFAEAVALASKGVFAYDKDDMRAGLPDSLFQPLTRDAVACMRSHEELVATWKKEYQEWLDRKSEWEAEPEHALYLNL
RPKFEEGEAARGGRFRKRAERDHAYLDWLEANPQLAAWRGKAPPAVVPIDEAGKRRIARAKAWKQASVRAEEFWKRNPELHALH
KIHVQYLREFVRFKQRPTFTMPDPVHHPRWCLFNAPQTSPQGYRLLRLPQSRRTVGSVELRLLTGPSDGAGFPDAWVNVRFKAD
PRLAQLRPVKVPRTVTRGKNKGAKVEADGFRYYDDQLLIERDAQVSGLKLLFRDIRMAPFADKPIEDRLLSATPYLVFAVKIKD
EARTERAKAIRFDETSELTKSGKKQKPKTLPAGLVSVAVDLDTRGVGFLTRAVIGVPEIQQTHHGVRLLQSRYVAVGQVEARAS
GEAEWSPGPDLAHIARHKREIRRLRQLRGKPVKGERSHVRLQAHIDRMGEDRFKKAARKIVNEALRGSNPAAGDPYTRADVLLY
ESLETLLPDAERERGINRALLRWNRAKLIEHLKRMCDDAGIRHFPVSPFGTSQVCSKCGALGRRYSLARENGRAVIRFGWVERL
FACPNPECPGRRPDRPDRPFTCNSDHNASVNLHRVFALGDQAVAAFRALPPRDSTARTLAGKRVEDTLRPQLMRLHKLADAGVD
SPF (SEQ ID NO: 303)
>UZXW01002767_11|M
[activated sludge metagenome]
MSVRAIQAKVMCDRATLENLWRTHRVFNERVPRILSLLFRMRRGECGKTPAERQLYQRIGQFITNCSAQNADYLMNAVTMRGWK
PGSAKKYKIRVKDENGETVEISGESWADEAAALSAKGSILCDKEDLAGDLPGCMRQMLNREAVAIISGHDELVANWSTDHVQWL
AEKAKWEREDEHKQYLALRSKFDEFEKSIGGKVGKRRGRWHLYIDWLRANPQLAAWRGGQATVNDLPPDALARIKKAKPWKTRS
VEAEEFWKVNPELAALDKLHGYYEREFVRRRKTKRNPDGFDHRPTFTMPDPTNHPRWFVFNAPQTNPAGYADLNLPDNQGDSGS
IKLCLLTGEKGDATEYPSDWITAQFRADPRLSRFRRVKVATTVNRGKAKGQAKEKDGYEFFDAHLMQWRPAEISGVKLILRHIK
LSGDSSLKSATPYLVFTVSTDDLALTEKARKIEWSDTGHVTKTGKPRKKRTLPDGLVACAIDLGLRHAGFATLALYQDGRPHVL
RSRNIWLEPDGRGPELGHIGRHKRKIRKLRRLRGKPVKGEESHIGLQKHITHMGEDRFKKAARGIINFAWNADGTVATKGADPF
PRADVILIEKLEGFIPDAEKERGVNRALAAWNRGQLVNRLKELAIDAGYKARIFEILPHGTSQVCSRCGAMGRRYSIARDEESG
RPEIRFGWVEKLFACPKCHFSANSDHNASVNLHRKFLLGDAAVAAFFDWKNLPEEKRRGELDAIDEALRGYLRKMHKLQAEIET
PF (SEQ ID NO: 304)
>3300009161|Ga0114966_10008307_8|M
[aquatic-freshwater-freshwater lake]
MKLLFKLRRGKIGKNKQQRDDYKRWFEYVIYNGAKNADYNLNALSINNWTPNTAKKYITKLMAGKNKIHAKGLDLVVSRIKSLS
DGGILAFDKDKIFIEIPYSFSQLIIRDAVAGISGHDALVKIWKEDHKKWRDEKKSWEDKTENKQYLKLQHIFKQFSDTAGGVGS
KKRGRWFTYLCWLSKQSALANWRGNGSFIEPFGEENCGKPSCNKGFKSKLIKESKKFFDANPELFEIHKLHQFYEKNFIRPKAK
KHNIDGFEHPPTFTLPDPVRHPIWACYNAPQTNPIGYKDLVLPKKYSGKSAGSFALNLLTGDIIDGKYPKEWVPFKFIADKRLS
CFKGKIKVVNNKIRTEYIFEDPHLSKKRQATIGGIKIILKDIKIDNLGHLLSATPYVVFACDVDNEPISEQAKKLKSEDTGETG
NSGLPIRKRILPEGCLISCAVDLGIRNLGFATLAESGGIPSECTHGDIKLLRSYNLLLEDGPSLEKIAKQKKLLGKFRRLRGKP
IKGEKSHVFLQNHITKMGVDRFNKAARLIVNFALNTEKKKNVQGIEYPRADVIVLENLAGLIPDAAKRKGINKALMNWNRGHLV
KRIQEIARDSGYLYRVYIMSPWGSSQVCCKCKGLGRRYSIIKDENGRQIQFGNGEKLFACANCRYMANADHNASINLHHIFKDK
DAVGFYKDYANKNEEEKQKIIDNLEAILRPHLQKMHFTTKKERSLDVPEHPLDVPF (SEQ ID NO: 305)
>3300009161|Ga0114966_10008307_7|P
[aquatic-freshwater-freshwater lake]
MGTRAIKAKIICDKTTLGYLWRSHCMYNQKLSEYMKLLFKLRRGKIGKNKQQRDDYKRWFEYVIYNGAKNADYNLNALSINNWT
PNTAKKYITKLMAGKNKIHAKGLDLVVSRIKSLSDGGILAFDKDKIFIEIPYSFSQLIIRDAVAGISGHDALVKIWKEDHKKWR
DEKKSWEDKTENKQYLKLQHIFKQFSDTAGGVGSKKRGRWFTYLCWLSKQSALANWRGNGSFIEPFGEENCGKPSCNKGFKSKL
IKESKKFFDANPELFEIHKLHQFYEKNFIRPKAKKHNIDGFEHPPTFTLPDPVRHPIWACYNAPQTNPIGYKDLVLPKKYSGKS
AGSFALNLLTGDIIDGKYPKEWVPFKFIADKRLSCFKGKIKVVNNKIRTEYIFEDPHLSKKRQATIGGIKIILKDIKIDNLGHL
LSATPYVVFACDVDNEPISEQAKKLKSEDTGETGNSGLPIRKRILPEGCLISCAVDLGIRNLGFATLAESGGIPSECTHGDIKL
LRSYNLLLEDGPSLEKIAKQKKLLGKFRRLRGKPIKGEKSHVFLQNHITKMGVDRFNKAARLIVNFALNTEKKKNVQGIEYPRA
DVIVLENLAGLIPDAAKRKGINKALMNWNRGHLVKRIQEIARDSGYLYRVYIMSPWGSSQVCCKCKGLGRRYSIIKDENGRQIQ
FGNGEKLFACANCRYMANADHNASINLHHIFKDKDAVGFYKDYANKNEEEKQKIIDNLEAILRPHLQKMHFTTKKERSLDVPER
PLDVPF (SEQ ID NO: 306)
>330001008|Ga0133913_10083255_2|P
[aquatic-freshwater-freshwater lake]
MGTRAIKAKIICDKTTLGYLWRSHCMYNQKLSEYMKLLFKLRRGKIGKNKQQRDDYKRWFEYVIYNGAKNADYNLNALSINNWT
PNTAKKYITKLMAGKNKIHAKGLDLVVSRIKSLSDGGILAFDKDKIFIEIPYSFSQLIIRDAVAGISGHDALVKIWKEDHKKWR
DEKKSWEDKTENKQYLKLQHIFKQFSDTAGGVGSKKRGRWFTYLCWLSKQSALANWRGNGSFIEPFGEENCGKPSCNKGFKSKL
IKESKKFFDANPELFEIHKLHQFYEKNFIRPKAKKHNIDGFEHPPTFTLPDPVRHPIWACYNAPQTNPIGYKDLVLPKKYSGKS
AGSFALNLLTGDIIDGKYPKEWVPFKFIADKRLSCFKGKIKVVNNKIRTEYIFEDPHLSKKRQATIGGIKIILKDIKIDNLGHL
LSATPYVVFACDVDNEPISEQAKKLKSEDTGETGNSGLPIRKRILPEGCLISCAVDLGIRNLGFATLAESGGIPSECTHGDIKL
LRSYNLLLEDGPSLEKIAKQKKLLGKFRRLRGKPIKGEKSHVFLQNHITKMGVDRFNKAARLIVNFALNTEKKKNVQGIEYPRA
DVIVLENLAGLIPDAAKRKGINKALMNWNRGHLVKRIQEIARDSGYLYRVYIMSPWGSSQVCCKCKGLGRRYSIIKDENGRQIQ
FGNGEKLFACANCRYMANADHNASINLHHIFKDKDAVGFYKDYANKNEEEKQKIIDNLEAILRPHLQKMHFTTKKERSLDVPER
PLDVPF (SEQ ID NO: 306)
>3300020109|Ga0194112_10008260_1|P
[aquatic-freshwater-freshwater lake]
MVDPEARAALWRTHGVYNECLRFALRHMHKMKRGEADPRYAEIFGAIRNSQHATAVMEAVTDPRWKPKKDPKPWHAPAAALIAE
GKLLFDRWKELPGLPGRFHRKLWEGAYQAMDSHKELMAIWASAHEEWQKARAEWEAENPEYMKLRPALEAFEAEHGQAAKRRQR
WHKWLAFLQANPGLAAWRGGADVVNPISDDGKERLRRAKRSKRNKVESEEFFNANPELKELDKLHGYYQREFVRPWAKKRNPDG
FRHRPTFTEPSPEKHPFWYQFKKGETYKALDLQAGTISLQLLAPEGAKRAALWTTFAFRPDPRLRLIQKVNPPLNEKFTYAFAD
PAYRGQPARPAEIRGAKLIFRPAQPDGAVYLSFTCDMPDLHCRLSVGQDSIDRYTTKGTKWLVGRLREEPELAGHEPVTCAVDL
GLRHLGAATVRRDGKIVRARLLREQGDPGKGPGLPAIAGHKRALAKGRRKRGKPIAGEESFVELQRHTDKMGEDRFKKGARRIV
AFAHENGADLIILEKLAGLVPDAEKERGINRALVSWNRANLEKWVKQLANDAGMRVVEVFPHWTSQLCSRCGSMGARFSAKEGL
PAFEPVGKLFACPECGYIANADHNASVNLHKRFYGELPEVERPNKDKRVFRLTPRGQPTVEVDMADVEKRILARGRAEDLCRGK
PTPF (SEQ ID NO: 307)
>3300020109|Ga0194112_10008260_1|M
[aquatic-freshwater-freshwater lake]
MDMVDPEARAALWRTHGVYNECLRFALRHMHKMKRGEADPRYAEIFGAIRNSQHATAVMEAVTDPRWKPKKDPKPWHAPAAALI
AEGKLLFDRWKELPGLPGRFHRKLWEGAYQAMDSHKELMAIWASAHEEWQKARAEWEAENPEYMKLRPALEAFEAEHGQAAKRR
QRWHKWLAFLQANPGLAAWRGGADVVNPISDDGKERLRRAKRSKRNKVESEEFFNANPELKELDKLHGYYQREFVRPWAKKRNP
DGFRHRPTFTEPSPEKHPFWYQFKKGETYKALDLQAGTISLQLLAPEGAKRAALWTTFAFRPDPRLRLIQKVNPPLNEKFTYAF
ADPAYRGQPARPAEIRGAKLIFRPAQPDGAVYLSFTCDMPDLHCRLSVGQDSIDRYTTKGTKWLVGRLREEPELAGHEPVTCAV
DLGLRHLGAATVRRDGKIVRARLLREQGDPGKGPGLPAIAGHKRALAKGRRKRGKPIAGEESFVELQRHTDKMGEDRFKKGARR
IVAFAHENGADLIILEKLAGLVPDAEKERGINRALVSWNRANLEKWVKQLANDAGMRVVEVFPHWTSQLCSRCGSMGARFSAKE
GLPAFEPVGKLFACPECGYIANADHNASVNLHKRFYGELPEVERPNKDKRVFRLTPRGQPTVEVDMADVEKRILARGRAEDLCR
GKPTPF (SEQ ID NO: 308)
>3300020222|Ga0194125_10021011_3|M
[aquatic-freshwater-freshwater lake]
MSTKAFTARLIVESPEARDALWRTHRLYNECLRFVLRHMHKMKRGEADPRYGEIFGAIRNSQHATAVMEAVTDLRWKPKKDPKP
WHTPAAALIAEGKLLFDRWKELPGLPGRFHRKLWEGAYQAMDSHKELMALWVSAHQEWQKARAEWEAENPEYMKVRPALEAFER
EHGQAAKRRQRWHKWLAFMRADPRLAAWRGGKALANPISDQGQQRLRRARRNKRNKVESEEFFNANPELKELDKLHGYYQREYV
RPWAKKRNPDGFRHRPTFTEPSPEKHPFWYQFKKGETYKALDLQAGTISLQLLAPEGAKRAALWTTFAFRPDPRLRLIQKANPP
LKEKFTYAFADPAFPGQPARPAEIRGAKLIFRRAQPDGAIYLSFTCDVPDLDSRLSILQKSCDKYGAKWACKKAMSDLGGQQPV
TCAVDLGLRHLGAATVRRDGKIVRARLLREEDQPGKGPALPAIAGHKRALAKGRRKRGKPIAGEESFIELQRHTDKMGEDRFKK
GARRIVAFARENGADLIILEKLGGDRRGALIPDAERERGINRALVLWNRGNLAKWVKQLAADAGMRVVEVHPYMTSQLCSRCGA
MGARFSAKEGLPAFEPVGKLFACPDCGYLANADHNASVNLHKRFFGELPEVQRPNRDKRVFRVTPDDQPTVEVDMADVEKRILA
RGRADDLCRGKRTPF (SEQ ID NO: 309)
>3300027770|Ga0209086_10006474_1|P
[aquatic-freshwater-freshwater lake]
MGTRAIKAKIICDKTTLGYLWRSHCMYNQKLSEYMKLLFKLRRGKIGKNKQQRDDYKRWFEYVIYNGAKNADYNLNALSINNWT
PNTAKKYITKLMAGKNKIHAKGLDLVVSRIKSLSDGGILAFDKDKIFIEIPYSFSQLIIRDAVAGISGHDALVKIWKEDHKKWR
DEKKSWEDKTENKQYLKLQHIFKQFSDTAGGVGSKKRGRWFTYLCWLSKQSALANWRGNGSFIEPFGEENCGKPSCNKGFKSKL
IKESKKFFDANPELFEIHKLHQFYEKNFIRPKAKKHNIDGFEHPPTFTLPDPVRHPIWACYNAPQTNPIGYKDLVLPKKYSGKS
AGSFALNLLTGDIIDGKYPKEWVPFKFIADKRLSCFKGKIKVVNNKIRTEYIFEDPHLSKKRQATIGGIKIILKDIKIDNLGHL
LSATPYVVFACDVDNEPISEQAKKLKSEDTGETGNSGLPIRKRILPEGCLISCAVDLGIRNLGFATLAESGGIPSECTHGDIKL
LRSYNLLLEDGPSLEKIAKQKKLLGKFRRLRGKPIKGEKSHVFLQNHITKMGVDRFNKAARLIVNFALNTEKKKNVQGIEYPRA
DVIVLENLAGLIPDAAKRKGINKALMNWNRGHLVKRIQEIARDSGYLYRVYIMSPWGSSQVCCKCKGLGRRYSIIKDENGRQIQ
FGNGEKLFACANCRYMANADHNASINLHHIFKDKDAVGFYKDYANKNEEEKQKIIDNLEAILRPHLQKMHFTTKKERSLDVPER
PLDVPF (SEQ ID NO: 306)
>3300015360|Ga0163144_10184575_1|M
[aquatic-freshwater-freshwater microbial mat]
MECNREELQHLWRTHCAFNERLPSILSVLFKMRRGEWGDTEQIKKKMQAFAWGVLQLEAQNSYDPLIKAASGSARNSTARNALR
KIAAKASKAIDDETAKPSESQDAAKLAKARKTLLQCQEYESSFDLFAKGLTPLKDVKDALADLPNHIERKLFEESSACIRGHLA
LVENWENEHVEWLKKKKDWEADPEHRKYLDVRHRFDAFEEEAGGKAGKRRGRWHLYLDWLRKNPDLAAWRGGQSSIGEPDASAK
LRIQKAKPWKQRSVEAEEFWKVNPELSALNKLHGFYEREFIRRRKTKKHSDGFDHRPTFTLPHAVNHPRWFVFNAPQTSPKGYC
ELKLPGAPGAEGSLELLLLTGEKEMGVYPKKWTSLVFKADPRLSDFKPVTVKKNANKGKVKGQETEKPAYSFYDRQLKQHRAAQ
ISGVKLIFKQVKLNEDGTLKSAVPYLYFTCSVVDIAITQKAQDIEWSETGETTKTGKARKRKTIPNGLIACAVDLGLRNLGFAT
LGVLESGEVRVLRSRNLWIGVAEPSGAHAGRWAEGPDLAHIGAHKRNIKRLRRQRGKPVEGERSHVELQEHIDHMGEDRFKKSA
RAIINFALNVDQTIDKKTGKPFPRADVLVMEKLEGFIPDAEKERGINRALVSWNRGQLIERLKQLAEDSGFKKRLFEIHPAGTS
QVCSRCGALGRRYSIARDETGQPEIRFGWVEKLFACPNSKCGYRANADHNASVNLQRSFFLDGQAVQAFYDWKGKPEPERKTFF
AAMDGKLQPALRVEHKLDGPTPF (SEQ ID NO: 310)
>3300013130|Ga0172363_10020541_1|M
[aquatic-freshwater-sediment]
MSIRAIQARVECDRPTLERLWLTHRIFNERLPVILSFLFRMRRGECGDTVVERKMYHEIADFILTHSQEAPYLFNAVSIKGWKP
GTAVKQSPGSEWPAQAAQLSKEGKLLYDKSNVLGDLPGTLQQMVCRESAAIISGHHELVRMWEAEHAQWLEDKSAWEADAEHQK
YLALRPRFDAFEQEAGGPAGKRRGRWHLYLNWLKQNPDLAAWRGGKPEVIELSPAARRRVERAKPNRQRSVEAEEFWKGNPELS
ALDRLHGYYEREFVRRRKTKKNADGFKHRPTFTLPHPRIHPRWFVFNAPQTQPSGYADLVLPTKPGEEGSVRMLVINAEKANGK
YPSEWVRIRFHGDPRLCNFRAVSSTRTISRGKDKGKTKESPSYVFRDRHLGQDRPATISGIKLIFRTNTDRTPKAAYLYFACTI
DDLPQSDAAKSIQWTETGEITSKGKKRKNMKVPDGLVGCAVDLGIRNLGFATLARYADGQPQILRSRNIWVRRQEAKGARTGRW
SAGADLAHIGEHKRTIRRLRRQRGKPVKDEKSHVGLQLHIDHMGEDRFKQAARAIINFALNADGDCNRKTGEVHPRADVLVLEN
LGGLIPDAEKERGINRALVNWNRGQLVERIKEMAQDVGLKVLEVSPVGTSQVCCKCGSLGRRYSVVRNEDTGRLDIRFGQVEKL
FACPASDCPGREAGRPDRPFTCNADYNASANLHRCFLLRDQAVKTYRDWRSGGDSKKAKEERETKIRNVEDALLGPLRIMHGME
DAPPF (SEQ ID NO: 311)
>3300013133|Ga0172362_10044703_1|M
[aquatic-freshwater-sediment]
MDGDTWANEAAALSAQGVLLYDKHAVLGDLPAHLRQMVCRESVAILSGHDELVARWNKEHQEWLTAKAKWEDEEEHKKYLALRP
RFEAFEKEAGGKAGKRRGRWHLYFSWLKANPDLAAWRGKADSVALLSDKAKERIRKARPWKKRSVEAEEFWKVNPELQALDKLH
GYYEREFVRRRKTQRNPDGFHHRPTFTLPHFTRHPRWFVFNAPQTSPQGYDNLQLPAKPHAGGSVELLLLTGDKTNGEYPSQWI
SIGFQGDPRLSLFRKVKKQRTVNRGKDKGTQKESDAYEFRDLHLNRWRKAEISGIKLLFRLNPNGSPKAAYLCFTCSITDEPLS
SNARKIKWSETGETTKKGKKRKRKTLPDGLVTCAVDLGIRNTGFATLAVHDQGNVLIRRSRNLWAGWLGEDSKDRDRWMDGPVL
AHIAAHKRKIRFLRRKRGKPVKGETSHVELQTHIDHMGEDRFKRAARAIINFALNVGSECDKKTGEVYPRADVLVLENMDGLIP
DAEKEHGVNRALVAWNRGQLTKRIEEIAEDVGLKILFVSPMGTSQVCSKCGSLGRRYSIKHDDMIDRPDIQFGFVEKLFACPSC
QYMANADHNASVNLHRRMVLDDKAVVAYNSFREKNKTDQATEIERIENILRPRLRLKHSLEGSVPF (SEQ ID NO: 312)
>3300031862|Ga031580_10005430_2|M
[aquatic-freshwater-sediment]
MVELYLRMRKGKHRETARKIAEIILKSPKNTAAAIMEGLTAKEWTSTRTTEWANLVRERRNAEGLLFDRHESVGSADGRNACCQ
RQQGPRKKPTDPSRLPVSSKFWRWLCDDACEVLKSNRGQMDDWRSEYREWRDEKTQWEKDHPEFMAFWNGLYQQFRQDCERAQI
EAQQAKGQKPTFRKRGGRQWGKRFERWHLWPEWIEQHPEILAWRGQAAAADFKPVPQQEKDALRKRFKRQDKYIGALLDKLRES
NSELAELDRLRRAYERQYVRFRRFPTLTLPDPDKHPRWMSLERDCLYKGFDPEKGTIKLSLVGENADGVWYMDWFDVQVQVDRR
LKPSFRREVFGREGRLPPFIEGRVGRKLSQPAPSPAERQSGVAGAKLIFKQGAAHLTFTIIDQDRAPRVKPRKVADRRCPADNI
FDPQGDRIPLRVVAVDLGVRHVGGYAVAEGRFENGAWSVGYITKGIVSGPQVPERFSIDAHHRQLKWARRLRGKPVFDEESCAE
LQDHVTHMGEDRFKKAAHAIVELARRHDVHVILFENLKGFVPSACDERWANRTRSKMLRRKTVEMVKAQCHDFGFYCNEEISPK
LTSHICSKCFRPGWRFSMKAKQPWSEKQPRSKCRDFGYPAWDAGGHLFRCPHCGYRVNADINAAGNLVAKFFGLWPDEKLERKD
WVYRWRENGESRQFDAKAEFEKWSDDVRSRKAARSFPY (SEQ ID NO: 313)
>3300031952|Ga0315294_10035890_2|P
[aquatic-freshwater-sediment]
MSVKCFQAKVVCDTPEKREYLWLTHTLFHEALRALIPHLFKMRRGDYGADFKEIYEAITDNQNSFAKLEPITTPKAWRSKHADT
GDTKNRWADLCLAVNREGRILFDRTQTPFGFGSEFWRKVCEMAIQLIHSHDGLLADWRKERAEWLDNKKQWEAANPEYMAAKPT
FDAFEDEAGRLRGSRKRWLLYLEFLQKHPELAAWRGGEAKVAPLTPAERKQCRRPGDQFEIFWEKNPQLAELNRLDRDWRRNFA
RFKRRPTWTNPDPELHPAWFSFKRGQTYKDLDFARRTFNLNVLVGEDVKGRKGKWVTYEFRHDPRLLRLRPAEQPVKVGPNKFT
WLYSDPLLKKDRPAEVKGIKLVFRNRHPYLLFSVDIADEKSAPLTRPGFDDKRLKRKATAADIPDGTRILSIDFGQRSLAACSV
CEFIKGHPERPDAVFFMKLPGLKFGDIGRHEQTISRRSSRMFRAGPRSRESRHAPRGGTTFREFRRHVLKMKDDRYKKATRLIL
DAAVRYDAQVILVENLENYKPDLERSARENRARMRWNVQRIVEFLDKSAHPLGLRLWKVWPRWSSRFCSACGHPGARFTIPRKN
AWKRFYERRHGPIRKPVTEPGGQFFICSNPKCPRSTGIINADVNASLNLPRILADDLEKPTGQGKTRLWRGQEYNPKAIAEQCQ
QRLDEHFRSKADLAQQTPW (SEQ ID NO: 314)
>3300031952|Ga0315294_10041214_2|M
[aquatic-freshwater-sediment]
MFQARIECDRQTLDRLWLTHRVFNERLPAIMSVLFNMRRGESGRNPQERRLYQRMARFFLAMDSKNAEYLLHSVSIKGWTPNTA
LKMRAKVRDAHGAEVPVSGDSWAPAAAALSAKGRLLYEKAQVLGDLPATLRQMVCREAVAVISGHDELVARWEKAHADWLKDKA
RWEADAEHQQYLALRPRFEAFEAEAGGKAAKRRGRWHKYLSWLRANPDLAAWRGKAAPGVQDLSPQARRRVQRAGLKRRAAVEG
EEFWKANPELSALDRLHGYYERAFVRRRKTKKNPDGFDHRPTFTLPHATRHPRWFVFNAPQTSPSGYADLAFPEKRGATGSIRL
CLLTGDKAADGKYPHEWVPVRFLADPRLSAFRPVKRQRVIGRGKRKGEAAEAKSAYEYFDRHLGKTREARFSGVKLVFRLYPDG
KPKAAYLYFACELTDEPLSERAKAIQWTETGEVTRKGKKRKSKRLPDGLVSAAVDLGIRNLGFATLARKEDGAVQVLRSRNLWT
GPDLHHITRHKRRLRALRRDRGKPVAGESSHVRLQGHIDHMGEDRFKRAARAIVNFALNTDGARNGRGQAHPRADVLVLESMEG
LIPDAEKERGINRALVAWNRGHLVERIRDMALDAGLKVFEVSPFGTSQVCSRCGALGRRYSLVREAETGEQAVRFGFVEKLFAC
PACGYRANADHNASVNLHRRFILEDAAVKAYQDLYNRPESERKVALADMESRLLSRLGVEHGLAKPPPF (SEQ ID NO:
315)
>3300031952|Ga0315294_10041214_2|P
[aquatic-freshwater-sediment]
MSVRMFQARIECDRQTLDRLWLTHRVFNERLPAIMSVLFNMRRGESGRNPQERRLYQRMARFFLAMDSKNAEYLLHSVSIKGWT
PNTALKMRAKVRDAHGAEVPVSGDSWAPAAAALSAKGRLLYEKAQVLGDLPATLRQMVCREAVAVISGHDELVARWEKAHADWL
KDKARWEADAEHQQYLALRPRFEAFEAEAGGKAAKRRGRWHKYLSWLRANPDLAAWRGKAAPGVQDLSPQARRRVQRAGLKRRA
AVEGEEFWKANPELSALDRLHGYYERAFVRRRKTKKNPDGFDHRPTFTLPHATRHPRWFVFNAPQTSPSGYADLAFPEKRGATG
SIRLCLLTGDKAADGKYPHEWVPVRFLADPRLSAFRPVKRQRVIGRGKRKGEAAEAKSAYEYFDRHLGKTREARFSGVKLVFRL
YPDGKPKAAYLYFACELTDEPLSERAKAIQWTETGEVTRKGKKRKSKRLPDGLVSAAVDLGIRNLGFATLARKEDGAVQVLRSR
NLWTGPDLHHITRHKRRLRALRRDRGKPVAGESSHVRLQGHIDHMGEDRFKRAARAIVNFALNTDGARNGRGQAHPRADVLVLE
SMEGLIPDAEKERGINRALVAWNRGHLVERIRDMALDAGLKVFEVSPFGTSQVCSRCGALGRRYSLVREAETGEQAVRFGFVEK
LFACPACGYRANADHNASVNLHRRFILEDAAVKAYQDLYNRPESERKVALADMESRLLSRLGVEHGLAKPPPF (SEQ ID
NO: 316)
>3300031952|Ga0315294_10058002_1|M
[aquatic-freshwater-sediment]
MSVRSIQARLHCDAKTLDDLWRTHRVFNERLPGINAILFKMRRGEFGGTPKEREMMQAFAWCVLRLDAKNSYDPLNKAAIGSAR
SASAVKAVNALIAQAKKTIAKPSAPQAMQDRGTLEEARKTMLFGPVCLDAFSKFATGYLPLKDLKDSLGDLPNAIGRRVLEEAC
ACLRGHFALAAKWQTEHADWLTEKAKWEADLEHQKYLGLRPRFEAFEKEAGGKAGKRRGRWHLYLAWLKANPDLAAWRGKADGV
TDLSKQARERIRRAKPRKQLSVEFDEFWKVNPEFQALNKLHGFYERRFSPPGKQQCGAKSKSLRKKKRNPDGFKHRPTFTLPHP
VRHPRWFVFNAPQTSPKGYWNLCLPTNPEAEGSVELLLLKGEKGADGKYPSDWVKVQYRGDPRLCLFRKVKKRRTVNRGKDKGA
EKEADAYEFRDAHLGLWRPTDISGVKLIFRFNHDGTPKAAYLYFTCNIKDVPLTANAKAIQWTETGEVTKKGKKRKRKTLPDGI
LTCAVDLGIRNLAFATLAVHHEKGNLVIKRSRNLWVGWQEGGDAKGERWLDGPDLAHIAKHKRKIRWLRGKRGKPVKGESSHVE
LQTHIDHMGEDRFKRAARAIINFALNAQAACDRHGEVYPRADVLILENMDGLIPDAEKERGINRALIAWNRGQLTKRIEEMAKD
VGLKIIPVSPMGTSQVCSRCGSLGRRYSIGRDEKTGQAEIRFGFVEKLFACPNSDCGYLANADHNASVNLHRRFALDDKAVAGY
AEHRVKGDDERTKEIADIEARLRPRLRLKHSLDGPVPF (SEQ ID NO: 317)
>3300032046|Ga0315289_10071835_2|M
[aquatic-freshwater-sediment]
MSARAFQAKVVVERPEDLQALRDLHRRFNEFLPPVIEALFKMKRGALGPDAQLLFSSMTSNQNAVAKLEPLTTPKPWKPRKKQQ
LDETWVQAAVRLREGRGILFDRFEAMPDVSSEFRRKVFEMAFACVDGHLQLVKRWRKEHEDWLKQKERWERGLVVTEEGEDEAS
AETRTWRERYMRLRPLFEEFEQRGVVRRNRRRWHEYIEFLSTHPAFAEFRPNALTDQERADLRDPIARFERLLEKNADLERLDN
LHGQYQDLIRPWARKRNPDGFKHRPTFTMPSVASHPQWFSFKKSATYKNLDLEKGVLALALGKEGAKAQWVTVRLATDPRLARF
RPAQRVGKGKRARSWVYLDPISGEEFDAEVRGLKLMFPKGIQGPAYLMFTVQLSDRPRQVVPRKDWTPPEGLLTLACDFGQRHL
GAITMCRYENGSPVQVPFTPAYLDHGRGRRTPSKPVSAWLPVIPGLRFDDIREHELEISARLSATYGDPRSRRQGGVGASRGRH
AAAGSRPFAQLRRHIDEMREVHFKKAAHLIVATALKNGAQVVIMEFLANYRPDLERSHRENRARMIWAVRRIQEFVEQTAALYG
IAVRTPSPYLTSQVCSACGSPGARFTRPSAMDWTRKPPGRKESWYEKRFGPKAKAVIEPGGPWFCCSNPNCPRPCRVIQADINA
SLNLHRRFYERFDLSWLPDGKPARKQFWGRLKGAIQAYLDQFDSLPRRPGATSHE (SEQ ID NO: 318)
>3300032053|Ga0315284_10046226_2|P
[aquatic-freshwater-sediment]
MATKTYRARFVNLTGRLDAALARTHHVFVECLRQLIGRYIEMRKGKYGPECRQLAEVILSRFNTFAHGVMDKLSRPNWESRLTD
DWVLLANSVCEAQGPLFDQHDGFAVVDGVTIHTKPHSKSEPVKNRLPVPAKFWHQVCDSASAYLQSNRALMEQWRNERKDWFKN
KTEWEQKHQEFMTFWNGMFKQFEDACEKQRLLSQQAAGQLPTAQKKQSRERGKRLGRWHLWYEWLVAHPEIIEWRGKAKATDFV
FVPDELKKIMSKHSRQDKFIPKHLDWLKENNPELKVLDDLRRTYVRNYLRFKRPPTLTLPSPKKHPYWFTLELDQFYKSPDFDK
GTVKVLLIDENDNGAWFFNWFDAGLLCDKRLKPSYRAEMFRNKGRYPPYIEGKVGRTLNRPAGSSKDRKAGYAGAKLVINGKRK
ELLFTVIEQDCPPSIKWTKVKHRRCSADNALSPDGERIPIKVMAIDLGIRHAGAYAIAEGTADDDIWQVKWLKKGIIDNSAMPD
LYQIRGHDRQLRRGRSKTGKAPKGERSFIDLQSHRTNMAQDRFKKAANAIINIARSYKVDVIIFEKLESLAPTAFDERWMNRQL
RDMNRRKIVDMVKQQAAEFGIKADDNVSPYLTSHVCSRCFKGGWRFSMKAKQPYKEKLSRKNCCDYGYPTWDAGGHLFRCPHCG
YSVNADINAACNVGAKFFGLWPATMSKIKREWVYTWDAENSEPFNAKEAFDKWAEDVKKHKALADSPF (SEQ ID NO:
319)
>3300032069|Ga0315282_10002412_8|P
[aquatic-freshwater-sediment]
MVTRALRARVIHPDATLLAALKRTHRVYNVLLRQMVELYLRMRKGKHRETARKIAEIILKSPKNTAAAIMEGLTAKEWTSTRTT
EWANLVRERRNAEGLLFDRHESVGSADGRNVCCQRQQGPRKKPTDPSRLPVSSKFWRWLCDDACEVLKSNRGQMDDWRRDYKEW
RNEKARWEKDHPEFMAFWNGLYQQFRQDCERAQIEAQQAKGQKPTFRKRGGRQWGKRFERWHLWPEWIEQHPEILAWRGQAAAA
DFKPVPQQEKDALRKRFKRQDKYIGALLDKLRESNSELAELDRLRRAYERQYVRFRRFPTLTLPDPDKHPRWMSLERDCLYKDF
DPEKGTIKLSLVGENADGVWYMDWFDVQVQVDRRLKPSFRREVFGREGRLPPFIEGRVGRKLSQPAPSPAERQSGVAGAKLIFK
QGAAHLTFTIIDQDRAPRVKPRKVADRRCPADNIFDPQGDRIPLRVVAVDLGVRHVGGYAVAEGRFENGAWSVGYITKGIVSGP
QVPERFSIDAHHRQLKWARRLRGKPVFDEESCAELQDHVTHMGEDRFKKAAHAIVELARRHDVHVILFENLKGFVPSARDERWA
NRTRTKMLRRKTVEMVKAQAGEFGFLCNEKISPKLTSHICSKCFRPGWRFSMKAKQPWSEKQPRSKCRDFGYPAWDAGGHLFRC
PHCGYRVNADINAAGNLVAKFFGLWPDEKLERKDWVYRWRENGESRQFDAKAEFEKWSNDVRSRKAAKSFPY (SEQ ID NO:
320)
>3300032118|Ga0315277_10001015_12|P
[aquatic-freshwater-sediment]
MATKSFEARVLCRDDPPDKKGEKYSAEQKKQFLWYTHQVFNESIRKVLPYVFKMKRGELGDEFQAIYYAISSSQDAVGKLEAIT
SLDWSSKKIGKSEPEKWKEILRYRELEKEFRQKLKDEEKNTKKFRKELQKKKKALANEIGQKDIWADAASIIQQKNNLLFDREK
ILPNLPSEFRRKIFEMCIQLIHGHQELVANWQDEHAEWLQEKDKFEEEHPDYMKVRPILEEFEKEAGKVKGSRIRWLKYLDYMS
SHPELAGWRGGEAKVEPLTSAERAKFRKPREHFEAFFKKNPELSALDSIHKQYQEKFARTQTKRTPNPDGFKHRPTFTLPSANL
HPAWYSFKGATDPTKGATYKLNFREDRRVDSFMNLKVLTDMEGEGRNPKGMITYDFEPDDRIRDFRYIGTTEKGKKAKGFVYYD
KILEKERPAKIQGIKLVFRPPRSDGVPYLIFSCSIEDEKSKIKIWQDKESEEGPDEARKGKKAKKIYPPELVTLAIDFGQRHLG
AITICKNNNGKPEQIKFIPAYPKRKQGKQTKPVSAWLAKVPGLTFNAIGMHEKEIRAGMHQRFQDPKSIRQAGEKEGRASKPRH
IPETETSFAHLRDHIAGMKEDHYKKAANLIIKTALQNGAQVILLEDLKKYRPMLEKESRENRRRMQWAVRQTAEFLKKTAKPLG
LLIYDRINPAYTSSMCSVCGNPGARISLPSKRNWEKYYAEYYGKERRMIAVVGGQFFCCPVCKKIINADINASQNMHKVFYNTF
NWPPKMEKKEKKIFWESVREQAQNILDQKAEPKREEDISY (SEQ ID NO: 321)
>3300032118|Ga0315277_10012802_3|M
[aquatic-freshwater-sediment]
MSVRAIQARVECDRATLEHLWRTHRVFNERVPVVLSWLFKMRRGECGRTEEEKRLYRTIADFVLANSQNAEAILNAVSIPNWTP
TSARKLKAKTVLSDGTEKVSTGMDWADKAAELSAAGRLLFDKREMLFDLPGTLRQMVCRDAGAIISGHEELVAVWKKAHADWLK
AKADWESQEENKLYLNLRPEFEAFEQAAGGRAAKRRGRWHLYLKWLKDHPRLGGWRGGEPIVNELSEQARRRIQKAKPWKQRSV
EGEEFWRANPELAALDRLHGYYEREFIRRRKTKKNPDGFTHPPTFTVPHAVRHPRWFVFNAPQTSPIGYRNLVLPPHAGPEGTV
ELRLLTGDKTDGKHPGNWVKVRFRADPRLSDFRPAKRTRSFNRGRNKGQTTQSDAYEYFDHHLGLMRSAEIKGLKLIFRFNPDD
SLRAAYLYFTCDVGSIPFTERTRAIQWTETGEVTKKGKKRKTKKLPDGLIACAVDLGLRHLGFATRARYAGANPEILRSRNLWL
GREEQKGRHPGRLSPGADLRHIAHHKRNIRRLRRLRGKPVKSESSHVELQTHIDHMGEDRFKQGARAIINFALNVKKGPDTRTG
EVHPRADVLILEKLAGLLPDAEKERGINRALVAWNRGQLVKRVKEMAQDVGLKVFEVSPVGTSQVCSRCGALGRRYSIVPDDRT
GRPGFRFGWVEKLFACPNPDCRYRGNADHNASVNLHRRFMLEDAAVKAFLDWRAKTKKEQEEVLRRIEKALCADLLRMHGLEEP
TPF (SEQ ID NO: 322)
>3300009499|Ga0114930_10003500_21|M
[aquatic-marine-deep subsurface]
MSTKAIQAKVICDTWEHRYFLWITHKLFNDSVQFVIPKVFAMKRGELGDDFKLIYDSIRSNQDAIGKLEQITSLEAKSNRQEKW
VLAAKKIREEKNLLFDRKKELPGFSSEFRRKVFEMTIQKIHGHQELVDDWEKEHNAWLKEKEKFEKDHQDLMALWSEIEKFEKE
AGSLKGSKKRWYRYLEFLGTHPAFSTYRDGGPLSKEERAGLKRPGEHFELFFKKNPKLVPVDSAIKKYCDLLRPWAKKRNSDGF
KLKPTFTLPNPIVHPEWYSFKKNSTYRKLDLQKGEVELKIIPSEDIDKRDPKKYISYRFGADPRIKNLIPSNIEKIGREKYDHN
YFDPVLDKKRPAVIKGIKLIFKGLNRKRKLWAEYEREKNTDKKKQLFAQWIDKLRPYFVFTLTLADEAKPVKLEWNKKEKHSVI
PKELVTMAIDVGQRDLGAVTIAREHNGVPVQIAFLPQYWKPLKNGNSAKPVKAWLVDIPGISFEALKKHEKEARGRERGAKARR
VKGENYAIGLRQHILHMKEDRYKKAGSILLRTAIKNKVHVIILEDLKKYKMNLERSKQENRQLMVWAIRKIQDFLELQAKPLGV
RVRSVWPHYTSQVCSACGEPGKRASLPSKSSWEKFYQKKYGEKRKWIVENGGKMFVCSNPNCVRKSRMINADINASLNLHKKFY
GILTYPPKTKEFKQQLTLDIQNYLDTILKF (SEQ ID NO: 323)
>3300011118|Ga0114922_10000510_27|M
[aquatic-marine-deep subsurface]
MATKSYRSRIVCTKAELDDLVRTHRVFNAGVRAMVDLYISMKKGTYGETAKEIARYLLDHSGTKGHDLMNPLTDRGGKDTRDDE
GMKLVRRHRQEHGILFPRHERICEIDGRKVRAGSSAKKEKSRDTLTISSIFWHFICNQAIEYLRSNNELMAAWREERGKWLRDK
EKFFAENPGFREFVEGYLAAFDAHAEKARQEFQTKAGQRAHARKRKKSGSGKRFSRWHLWCEWICDHPEIIEWRGKAKGEGFAF
LTAEEVRAIEEEFPKREDRRAGRMLDMLTRKNPELAEVEKLRKKYNNDYARFRRPPTLTLPSAKKHPCWYRLEKGKLYRNEDFE
KGTIEILVICHDEKEDAYYMDWRPFSIKPEPRLVPSHRARAFAAEGRYPPYKEGKVGNTLNRPAESAEERLAGLKGAKLILKPK
GNAQLVFTVVEQNEPLKAKFRKKAGATSSADRLDILDGNKATRVMGIDLGARHVGAYVITEGKKKGDGWKLAPLRKGFIDSPDL
PRLRSITRHENQLKKGRRKRGKPVKNERSFISLQGHRTKMSTDRFKKAANLIVEKAREHDVHIIVFEDLRRLKPTAYDERWLNR
QVRSMNHRHIFDLAKEMAPEFGIQVTDINPYNTSRLCSKCGFPGYRFSMKRKNPYREQAPRRECADFGYPVWDSGGHLFRCPHC
GYRVQADLNAAGNIARKFFGHFMDWECKEYTYRNAVQPSFDARKDFDQWASGVLKRRTMPDAPF (SEQ ID NO: 324)
>3300017960|Ga0180429_10052609_1|M
[aquatic-non marine saline and alkaline-hypersaline lake sediment]
MSQRALAVRLLVDSEDDRAALWRTHRIFNERLGWVLRQMHRMKRGEPDARYAEIFNAITTSQRATAALEAVTSLAWTGTKEDRW
CQLARALIQEGTLLFDREARLAGLSKEFRRKLFEAAFQMISGHRELLAQWERDHNEWQQARETWEAENPEYMAIRPALQRFEAE
HGQAAKRRARWHKWRAFLQGSSQLAGWRGGPQVVNEISADARRRIERARRNKRNKIEAEEFFRVNPELKELDAKHGYYQREFLR
PWAKRRNADGFKHRPTFTEPSAENHPFWFQFKKHETYKDLNLKVRSLRLKLLASDSAVPGSQWRDFRFRVDPRLLDLSEAQSPA
KIGIARFSLLFNDRALAMEDRPAEIRGAKLIFRPAQRDGRVYLSFTCDVADLPCRVPLKQESWDKYSAEWLCKKSREALDGEDP
VTCAVDLGIRRLGAASVRRDGKIVRARIIREEQQRGCGPRLAAIKNHKRALKAGRRKRGKPVRGEQSLVELQEHVDKMGRDRFK
KGARRIVNFAHQNHCDVIVMEKLAGLIPDAERERGINSALVNWNRGHLVKWVKQLANDAGMRVVEVYPHWTSQLCSRCGAMGAR
FSADHGHVAFEYVGSLFACADCGYVANADHNASVNLHRRFYGELPKVKKLREGVYELAKPDHAPKEVKLAELRSAVSVAAAAMC
RGQASPF (SEQ ID NO: 325)
>3300017963|Ga0180437_10045654_1|M
[aquatic-non marine saline and alkaline-hypersaline lake sediment]
MATKTYRARIVQISPRLGAALERTHYLFAEALNQMVRRYIDMRKGKYGQECKKLADIMLTRSNTFAHGVMDQLTREISTSGLTD
EWVDLARAVHKSHGPLFLQHDGFAEVDGVMLHTKRHGKVSPMPGRLPVNAKFWHQVCDSASAFLKSNNELLENWRQGRKEWLQE
KADWESANADFMRFWNGSYQEFEETCEIKRKESQALEGQKVVEKKRHRRDRGKRMSRWHLWYNWVITHPEIIEWRNRAKAAEFR
PVPPTVHKKIKNKYPRQDKHITKFLDWLKENNPELKALDSRRRFYVRNYLRFRRPPTLTLPSANKHPYWFTFELNQFYKNVDFD
KGSIQLLLVDETEEGSWFFRWFDAKIQCDPRLRPCVRAGVFATKGRYPPYIGGKVGNKLNRPAERPENRKAGYAGAKLVLNKRR
KELFFTVIEQDCPRKVSWKKTKQRTCRGDNVFAKDGSQIPLKVMAIDLGIRHIGAYVIAEACRNRGVWDISWQHKGITGRHAVP
GLKEIRQHDRQLRKARSQRGKPVQGEESFIELQDHRTNMADDRFKKAANTIVELARQYDVHLILFERLGNLSPTAFDERWMNRQ
LRDMNRRQIVDTVKLQAREFGIECLEDISPWMTSHICSRCFKPGWRFSIKRKNPYGERFTRKNCRDYGYPVWDTGGHLFRCPHC
EYKCNADINAACNVAAKFFGLWSGLDGLKRDQWVYTWQENQPKTFDAKKTFLEWALDVRNRKLMGDSPF (SEQ ID NO:
326)
>3300017971|Ga0180438_10003700_2|P
[aquatic-non marine saline and alkaline-hypersaline lake sediment]
MATKTYRARIVQISPRLGAALERTHYLFAEALNQMVRRYIDMRKGKYGQECKKLADIMLTRSNTFAHGVMDQLTREISTSGLTD
EWVDLARAVHKSHGPLFLQHDGFAEVDGVMLHTKRHGKVSPMPGRLPVNAKFWHQVCDSASAFLKSNNELLENWRQGRKEWLQE
KADWESANADFMRFWNGSYQEFEETCEIKRKESQALEGQKVVEKKRHRRDRGKRMSRWHLWYNWVITHPEIIEWRNRAKAAEFR
PVPPTVHKKIKNKYPRQDKHITKFLDWLKENNPELKALDSRRRFYVRNYLRFRRPPTLTLPSANKHPYWFTFELNQFYKNVDFD
KGSIQLLLVDETEEGSWFFRWFDAKIQCDPRLRPCVRAGVFATKGRYPPYIGGKVGNKLNRPAERPENRKAGYAGAKLVLNKRR
KELFFTVIEQDCPRKVSWKKTKQRTCRGDNVFAKDGSQIPLKVMAIDLGIRHIGAYVIAEACRNRGVWDISWQHKGITGRHAVP
GLKEIRQHDRQLRKARSQRGKPVQGEESFIELQDHRTNMADDRFKKAANTIVELARQYDVHLILFERLGNLSPTAFDERWMNRQ
LRDMNRRQIVDTVKLQAREFGIECLEDISPWMTSHICSRCFKPGWRFSIKRKNPYGERFTRKNCRDYGYPVWDTGGHLFRCPHC
EYKCNADINAACNVAAKFFGLWSGLDGLKRDQWVYTWQENQPKTFDAKKTFLEWALDVRNRKLMGDSPF (SEQ ID NO:
326)
>3300017991|Ga0180434_10065880_1|P
[aquatic-non marine saline and alkaline-hypersaline lake sediment]
MSVKTIQAKLECDRETLETLWRTHTVFNEGLLPILALFFKMKRRETGSTEEEKDLYKRICEFILRTNASNPGYLLNSVCLENWK
PDSARKTKAEVVRDGKKEKISAEEWIDDLLNMKEESGLLFLKQELLNGLPIMFFEKLVAESKAILSAYEELQYQWEVDHNKWLK
EKEGWEKKHKEYLAVRSLFQKFEQEVKGKITKKRRRWHLYKDWMKRTPELVAWRGKETKVYGLTEEDREAIKKAPLKKKIGVEV
GLFFKRNPELSALDKLHSYYEEKFVRRGKKKRNCDGYEHRPTFTLPHSVKHPRWYVFSGPQTGNGYKNLNIPERKKDFGQLDLL
VLTDDKVDGEYPREYRTVKFRGDHRFLDIRGATRTRLVTKGKNKGQEVEEKFAYEMYDRYLKIWRPLKISGAKLAFRDIKINQD
GSLKSAVPYLWVTLNLEDLPISEKAKEIKWVETDEVKDNGDKRKKIQIPEGLITCAVNIGIRNLGFGTLAVGEKGKARILRSRN
IWIGEEEKTGKHKGRWQKGPTLRELRDHKQEIRRLRKLRGKVVKGERSHIKLQNHITNFADDRLKKAARKILNFALNVENHIDK
KTGKPYPRADVLLLEDLSTLVPTTKKRRDQNQLLIEFMHRGTLSKIEEMAKDAGLKVLRIKPGGISQVCPKCGGIGRRYEIRID
QETKKPDIHFTDVIDDIDCQKLFVCASCSYRGNGDHVASVNLHRKFYDWSVVDKYFTLLRSDNYKEQKKVIEEELREFLRKEHF
PQMALN (SEQ ID NO: 327)
>3300017992|Ga0180435_10008274_7|P
[aquatic-non marine saline and alkaline-hypersaline lake sediment]
MTIKSFEAKIVTNPSLRETLEYTHRVYNEDLKYMVEVLLAMRKGKHGDGYVEFWREHLQKAANPSGLLEPLTTPDGPKADAKSK
KSKIIRQLFKEHGMLFDRDERWPHWNARHRRHLFDDAKKWARQLDERLERWRSEHAQWLKEKEKFENENPLYMAVEPLFGGFFK
EFGQGGKRRERWAAYYHFLLAHPELANWRGQADAIVPLTPEEEAACLRDRRRGVKKRLDLFLEKNPELEALHKLDAKYGRNMVR
RSARHRNIDGFRHPPTMTLPHSRLHPEWITFQAGETYKDLDLNGGTVRLNILPPDAETSKLHSVEFRAEKRLRRITPRETPLRK
GRNEFNKNYRDAADRVHPARVKGIRLILRPRGAYLKITVELDRPESRTGLKQQTCDKYSSNWCYQEIVKRREGKPLKCLSLDLG
VRHLAVGVVVQETRANGDRETVIEGVRFFKEVGGRPFPSLDEIRRHKDRLREKRSQTRRAPKGRRTCIALQDHVTKMGQDRYRK
GAAAIVRYAVERDVDVILLEKLAGFIPDAAKQRGINKALMEWNRRKIADFVKLLAADHGISVVEVAPHHLSQLCSKCGELGRRF
SWKDGLPKFGTVEKLFVCPACGYQANSDYNAAVNLYKAFSGAYEERPKKAKKGVYKYRDRTICLKKLDGQLAERLTQEQTPF
(SEQ ID NO: 328)
>330001808|Ga0180433_10080815_1|M
[aquatic-non marine saline and alkaline-hypersaline lake sediment]
MSVKTIQAKLECDRETLETLWRTHTVFNEGLLPILALFFKMKRRETGSTEEEKDLYKRICEFILRTNASNPGYLLNSVCLENWK
PDSARKTKAEVVRDGKKEKISAEEWIDDLLNMKEESGLLFLKQELLNGLPIMFFEKLVAESKAILSAYEELQYQWEVDHNKWLK
EKEGWEKKHKEYLAVRSLFQKFEQEVKGKITKKRRRWHLYKDWMKRTPELVAWRGKETKVYGLTEEDREAIKKAPLKKKIGVEV
GLFFKRNPELSALDKLHSYYEEKFVRRGKKKRNCDGYEHRPTFTLPHSVKHPRWYVFSGPQTGNGYKNLNIPERKKDFGQLDLL
VLTDDKVDGEYPREYRTVKFRGDHRFLDIRGATRTRLVTKGKNKGQEVEEKFAYEMYDRYLKIWRPLKISGAKLAFRDIKINQD
GSLKSAVPYLWFTLNLEDLPISEKAKEIKWVETDEVKDNGDKRKKIQIPEGLITCAVNIGIRNLGFGTLAVGEKGKARILRSRN
IWIGEEEKTGKHKGRWQKGPTLRELRDHKQEIRRLRKLRGKVVKGERSHIKLQNHITNFADDRLKKAARKILNFALNVENHIDK
KTGKPYPRADVLLLEDLSTLVPTTKKRRDQNQLLIEFMHRGTLSKIEEMAKDAGLKVLRIKPGGISQVCPKCGGIGRRYEIRID
QETKKPDIHFTDVIDDIDCQKLFVCASCSYRGNGDHVASVNLHRKFYDWSVVDKYFTLLRSDNYKEQKKVIEEELREFLRKEHF
PQMALN (SEQ ID NO: 329)
>3300009503|Ga0123519_10002165_1|M
[aquatic-thermal springs-hot spring]
MATKSFEAKIVCKPDEKYTAEQKKQFLWFTHQVFNDGVRKVIPYVFKMKRGELGPEFQAIYYAITSSQDAIGKLEAVINPDWTS
GKIGKSDPNKWKELLKYQELEKGFRQRLKEEGIKSTKKFRKELEDEKKKLAKEIGQKDIWADAAAILRNKNLLLFNRDELLPNL
PSEFRRKIYEMTIQLIHGHQELVANWEDEHAEWLIEKDKWEEEHPEYMNVRPIFEKFEKEQGKVKGSRIRWLAYLDFLSSKPEL
ANWRGKAKETIPLTKEERAGFRKPGQHFAAFFNKNPELQELDRLHKEYQEKFARTQSKRTPHPDGFKHRPTFTLPDAMRHPVWY
SFKGATDPTKGSTYRNLDLENCTLDLKVLTAMEGEGRNPGGMIQYAFEPDERIKGFRYVGTTEKGKRAKGYIYYDPILEKERPA
KIQGIKLVFRPPRPDGTAYLIFSCQIEDEKPKIKIWKDKEEESPGEITKRKKTEVYPPELITLAIDFGQRHLGAITICKNNNGR
PEPIRFIPAYPKRRKDRESKPVSAWLAKIPGLTFNAVGMHEKEISAGMSRRFQDPKSIRQAGEKEGRKSKGQHIPETETPWAHL
REHIANMKEDHYKKAANLIIRTALQNGAQVILIENLRNYRPMLERTNLENRRRMQWAVRQTAKFLEDTARPLGLIVRQVSSAYT
SRFCSSCGHPGARVSLPGQKNWEKFYAEKYGKERKMIAVAGGQFFCCPACKKIINADINASLNMHKVFYQNFIWPGKIDKKDTK
NFIWQGKNYNWDQIADDVQSFLDQKAGIKKEDDIPY (SEQ ID NO: 330)
>CAAACB010000011_94|M
[bioreactor metagenome]
MSTRAIQARVVADKALLQKLWLTHRAFNEHLPHFSQTLFRMMRGELGDSDQDKAQWAGFVKGVLAQPSKNAYDCLIKATNQTTR
SDTTAAKALSKMEAAARKDIDALNAVPEAKRDPEKFAEASNRLEICRLYNAAFEEFRKGNRPLAHSRQQLDALPNFIERKVIEE
SVAILRSHLELVELWKAEWRQWSDDKAKWEADEVNRRYLAIRPIFEQFEESSGRSAHRSFRWKAYFEFLKSHPELAAWRGGAAV
VHPITDAGLRAIQRARLRKKDQIFAEEFFKANPELEALHRRHMEYEKRFVRRRKSKRSKAWITGFKNRPTFTLPDALRHPRWFV
FNAPQTAPAGYRKLRLPNTPGGEGSMELELLSGTMEKGEHKTVRTTIRFRGDPRLALFKPVMVKRKAIKGAIKGQETDKAAYVF
SDPQLHKDRPAKIGGAKLILRNIKLDEAGQLVSATPYIYFTVDVESPRWSPLAAAIKSVDDVPGGDGRKSRRRSLPDGLVVCTV
DLGIRNLGFATLARIEDGKPRILRSRNLWLGFEETGKHEGRWASGPDLTHISNHKQELRRLRRMRGRPVAGEESHAELQAHIDH
MAEDRFKKAARLITDFALNTDRNSPKGQETPYPSADILVVERLAGLVPQADKERGINRALIEWNRGQLVERLKLVTESVGLRLF
EIGAAGTSQVCSRCGALGRRYSIVPDPHPLFRPAPHVIRFSEVEKLFACPACGYRANADHNAAVNLQRRFALGETAIAAAMDLW
HRPKPEKEAMRKSIEAQLRSKLEIEHKLAEPLP (SEQ ID NO: 331)
>SRR5251193_megahit_k177_201695_120|P
[bioreactor metagenome]
MGIKSWRVKLWVESPEIRATLEYCLSLWNTSAALLCRHVLAMRRGDFGPEGQAIWEHLKKTPHNFHVLYPISNGSGIEKTTRYY
PDARAFVNKYGYGALGPVRSASGCLWKQLTKAVRERTHSYDKTCEKWSEEHSKWLEERAKWEAEHPEYMAIRPLIDTFHAKHGV
TRGRRNRWALWLQFLMETPELVRWRNKTAKVVPLTDSELKRIRSKRRGAARREQALFYEKNPELAELNRIHGIYERRFARSAAK
RKNPDGFRHRPTFTLPSEAKYPDWPRFQAGEGWRDLDLDRRTICLKLPTDGGSARWVQVHFVPDPRLQRLARLKQPVKEGATRY
DYSLDMPSGHTVLAQPQEVRLIRRGSSYFATIRLSLHSAPSAIPVPQTAASSPAGMLRKIRTDAPELKLITCAVDLGVRHLGAA
TIAREGEIIGRRILHNRFLAPGADGGVINIPSLPQIAQVRRQIRCAQRRSGRISPKVAGCRHLWTHYRHLCEDRYKKAVAAIFG
FARAHGAHIVLFEDLKMLNPDSANERGVNRALQNWNRGRIVEFAKNTAEDAGLCVVTVPAYWTSRICARCNAFGVRFNQGQRRK
PGDDGHVSRVACELDFLGHWFLCPSCGRSVHADLNASENLHRVFLGTFPTVQTIQRQPRIYEINGQRVALDEIQQRAVEILASR
RAGDTPF (SEQ ID NO: 332)
>SRR5251487_megahit_k177_199995_1|P
[bioreactor metagenome]
MGIKSWRVKLWVESPEIRATLEYCLSLWNTSAALLCRHVLAMRRGDFGPEGQAIWEHLKKTPHNFHVLYPISNGSGIEKTTRYY
PDARAFVNKYGYGALGPVRSASGCLWKQLTKAVRERTHSYDKTCEKWSEEHSKWLEERAKWEAEHPEYMAIRPLIDTFHAKHGV
TRGRRNRWALWLQFLMETPELVRWRNKTAKVVPLTDSELKRIRSKRRGAARREQALFYEKNPELAELNRIHGIYERRFARSAAK
RKNPDGFRHRPTFTLPSEAKYPDWPRFQAGEGWRDLDLDRRTICLKLPTDGGSARWVQVHFVPDPRLQRLARLKQPVKEGATRY
DYSLDMPSGHTVLAQPQEVRLIRRGSSYFATIRLSLHSAPSAIPVPQTAASSPAGMLRKIRTDAPELKLITCAVDLGVRHLGAA
TIAREGEIIGRRILHNRFLAPGADGGVINIPSLPQIAQVRRQIRCAQRRSGRISPKVAGCRHLWTHYRHLCEDRYKKAVAAIFG
FARAHGAHIVLFEDLKMLNPDSANERGVNRALQNWNRGRIVEFAKNTAEDAGLCVVTVPAYWTSRICARCNAFGVRFNQGQRRK
PGDDGHVSRVACELDFLGHWFLCPSCGRSVHADLNASENLHRVFLGTFPTVQTIQRQPRIYEINGQRVALDEIQQRAVEILASR
RAGDTPF (SEQ ID NO: 332)
>SRR5576005_megahit_k177_1292294_1|M
[bioreactor metagenome]
MSTRAIQARVVADKALLQKLWLTHRAFNEHLPHFSQTLFRMMRGELGDSDQDKAQWAGFVKGVLAQPSKNAYDCLIKATNQTTR
SDTTAAKALSKMEAAARKDIDALNAVPEAKRDPEKFAEASNRLEICRLYNAAFEEFRKGNRPLAHSRQQLDALPNFIERKVIEE
SVAILRSHLELVELWKAEWRQWSDDKAKWEADEVNRRYLAIRPIFEQFEESSGRSAHRSFRWKAYFEFLKSHPELAAWRGGAAV
VHPITDAGLRAIQRARLRKKDQIFAEEFFKANPELEALHRRHMEYEKRFVRRRKSKRSKAWITGFKNRPTFTLPDALRHPRWFV
FNAPQTAPAGYRKLRLPNTPGGEGSMELELLSGTMEKGEHKTVRTTIRFRGDPRLALFKPVMVKRKAIKGAIKGQETDKAAYVF
SDPQLHKDRPAKIGGAKLILRNIKLDEAGQLVSATPYIYFTVDVESPRWSPLAAAIKSVDDVPGGDGRKSRRRSLPDGLVVCTV
DLGIRNLGFATLARIEDGKPRILRSRNLWLGFEETGKHEGRWASGPDLTHISNHKQELRRLRRMRGRPVAGEESHAELQAHIDH
MAEDRFKKAARLITDFALNTDRNSPKGQETPYPSADILVVERLAGLVPQADKERGINRALIEWNRGQLVERLKLVTESVGLRLF
EIGAAGTSQVCSRCGALGRRYSIVPDPHPLFRPAPHVIRFSEVEKLFACPACGYRANADHNAAVNLQRRFALGETAIAAAMDLW
HRPKPEKEAMRKSIEAQLRSKLEIEHKLAEPLP (SEQ ID NO 331)
>UOUK01008448_2|M
[bioreactor metagenome]
MHLWRTHCVFNQRLPALLKRLFAMRRGEVGGNEAQRQVYQRVAQFVLARDAKDSVDLLNAVSLRKRSANSAFKKKATILRNGQR
REVTGEEVFAEAVALASKGVFAYDKADMRAGLPDSLFQPLTRDAVACMRSHEELVETWKKECREWLDRKSKWEAEPEHALYLKL
RPKFEKGEAERGGRFRKRAERDRAYLDWLEANPQLAAWRGKAPPAVVPIDEAGKRRIARAKAWKQASVRAEEFWKRNPELHALH
KIHVQYLREFVRFKQRPTFTMPDPVRHPRWCLFNAPQTSPQGYRLLRLPQSRRTVGSVELRLLTGPSDGAGFPDAWVNVRFKAD
PRLAQLRPVKVARTVTRGKNKGAKVEADGFRYYDDQLLIERDAQVSGVKLLFRDIRMAPFADKPIEDRLLSATPYLVFAVEIKD
EARTERAKAIRFDETSELTKSGKKRKTLPAGLVSVAVDLDTRGVGFLTRAVIGVPEIQQTHHGVRLLQSRYVAVGQVEARASGE
AEWSPGPDLAHIARHKREIRRLRQLRGKPVKGERSHVRLQAHIDRMGEDRFKKAARKIVNEALRGSNPAAGDRYTRADVLLYES
LETLLPDAERERGINRALLRWNRAKLIEHLKRMCDDAGIRHFPVSPFGTSQVCSKCGALGRRYSLARENGRAVIRFGWVERLFA
CPNPECPGRRPDRPDRPFTCNSDHNASVNLHRVFALGDQAVAAFRALPPRDSPARTLAVKRVEDTLRPQLMRVHKLADAGVDSP
F (SEQ ID NO: 333)
>U0UL01003058_1|M
[bioreactor metagenome]
MHLWRTHCVFNQRLPALLKRLFAMRRGEVGGNEAQRQVYQRVAQFVLARDAKDSVDLLNAVSLRKRSANSAFKKKATISCNGQA
REVTGEEVFAEAVALASKGVFAYDKDDMRAGLPDSLFQPLTRDAVACMRSHEELVATWKKEYREWRDRKSEWEAEPEHALYLNL
RPKFEEGEAARGGRFRKRAERDHAYLDWLEANPQLAAWRGKAPPAVVPIDEAGKRRIARAKAWKQASVRAEEFWKRNPELHALH
KIHVQYLREFVRPRRTRRNKRREGFKQRPTFTMPDPVRHPRWCLFNAPQTSPQGYRLLRLPQSRRTVGSVELRLLTGPSDGAGF
PDAWVNVRFKADPRLAQLRPVKVPRTVTRGKNKGAKVEADGFRYYDDQLLIERDAQVSGVKLLFRDIRMAPFADKPIEDRLLSA
TPYLVFAVEIKDEARTERAKAIRFDETSELTKSGKKRKTLPAGLVSVAVDLDTRGVGFLTRAVIGVPEIQQTHHGVRLLQSRYV
AVGQVEARASGEAEWSPGPDLAHIARHKREIRRLRQLRGKLVKGERSHVRLQAHIDRMGEDRFKKAARKIVNEALRGSNPAAGD
PYTRADVLLYESLETLLPDAERERGINRALLRWNRAKLIEHLKRMCDDAGIRHFPVSPFGTSQVCSKCGALGRRYSLARENGRA
VIRFGWVERLFACPNPECPGRRPDRPDRPFTCNSDHNASVNLHRVFALGDQAVAAFRALAPRDSPARTLAVKRVEDTLRPQLMR
VHKLADAGVDSPF (SEQ ID NO: 334)
>3300009652|Ga0123330_1010394_3|M
[bioreactor-anaerobic-anaerobic biogas reactor]
MHLWRTHCVFNQRLPALLKRLFAMRRGEVGGNEAQRQVYQRVAQFVLARDAKDSVDLLNAVSLRKRSANSAFKKKATISCNGQA
REVTGEEVFAEAVALASKGVFAYDKDDMRAGLPDSLFQPLTRDAVACMRSHEELVATWKKEYREWRDRKSEWEAEPEHALYLNL
RPKFEEGEAARGGRFRKRAERDHAYLDWLEANPQLAAWRRKAPPAVVPIDEAGKRRIARAKAWKQASVRAEEFWKRNPELHALH
KIHVQYLREFVRPRRTRRNKRREGFKQRPTFTMPDPVRHPRWCLFNAPQTSPQGYRLLRLPQSRRTVGSVELRLLTGPSDGAGF
PDAWVNVRFKADPRLAQLRPVKVPRTVTRGKNKGAKVEADGFRYYDDQLLIERDAQVSGVKLLFRDIRMAPFADKPIEDRLLSA
TPYLVFAVEIKDEARTERAKAIRFDETSELTKSGKKRKTLPAGLVSVAVDLDTRGVGFLTRAVIGVPEIQQTHHGVRLLQSRYV
AVGQVEARASGEAEWSPGPDLAHIARHKREIRRLRQLRGKPVKGERSHVRLQAHIDRMGEDRFKKAARKIVNEALRGSNPAAGD
PYTRADVLLYESLETLLPDAERERGINRALLRWNRAKLIEHLKRMCDDAGIRHFPVSPFGTSQVCSKCGALGRRYSLARENGRA
VIRFGWVERLFACPNPECPGRRPDRPDRPFTCNSDHNASVNLHRVFALGDQAVAAFRALAPRDSPARTLAVKRVEDTLRPQLMR
VHKLADAGVDSPF (SEQ ID NO: 335)
>3300012949|Ga0153798_10025413_2|P
[bioreactor-switchgrass degrading]
MRRGDFGPEGQAIWEHLKKTPHNFHVLYPISNGSGIEKTTGYYPDARAFVKKYGYGALGPVRSASGCLWYQLTKAVRERSHSYD
KTCEKWSEEHSKWLEERAKWEAEHPEYMAIRPLIDTFHAKHGVTRGRRNRWALWLQFLMETPELVRWRNKTAKVVPLTDSELKR
IRSKRRGAARREQALFYEKNPELAELNRIHGIYERRFARSAAKRKNPDGFRHRPTFTLPSEAKHPDWPRFQAGEGWRDLDLDRR
TICLRLPTDGGSARWVQVHFVPDPRLQRLARLKQPVKEGATRYDYSLDMPSGHTVLAQPQEVRLIRRGSSYFATIRLSLHSAPS
AIPVPQTAASSPAGMLRKIRTDAPELKLITCAVDLGVRHLGAATIAREGEIIGRRILHNRFLAPGAAGGVINIPSLPQIAQVRR
QIRCAQRRSGRISPKVAGCRHLWTHYRHLCEDRYKKAVAAIFGFARAHGAHIVLFEDLKMLNPDSANERGVNRALQNWNRGRIV
EFAKNTAEDAGLCVVTVPAYWTSRICARCNAFGVRFNQGQRRKPGDDGHVSRVACELNFLGHWFLCPSCGRSVHADLNASGNLH
RVFLGTFPTVQTIQRQPRIYEINGQRVALDEIQQRAVEILASRRAGDTPF (SEQ ID NO: 336)
>SRR7811943_megahit_k177_406423_2|M
[cave metagenome]
MGVRAIRARIECDRETLLSLWRTHRVFNERLPSLIAKLFAMRRGEFGSNAAQRKLYERAVRFILARDSKDAPYLLNSVSIKGWK
HATALKMKARVPDGAGDVQEVTGDSWAAEAATLSANGTLAYDKETERDGLPDSLFQPLIRDAVAYISGHDELVRNWRKEHEDWL
KKRAEWETKDERKKYLALRPQFDQFEEAVGGKAGKRRERWHLYLKWLRDNPDLAAWRGGAAVVRPLDARAQGRVARAKPWKQRS
VEAEEFWKANPELSALDRLHGFYEREFVRRRKTKRNPDGFDHRPTFTLPDPVLHPRWALFNAPQTSPSGYRALSLPMGRAGFGS
VELCLLTANRDGREWPRAWKSIRFRSDPRLAQFCEHTETTTFVKGKKKGQAKTRQSFSYTDNQLGGINRPAQISGAKLILKDLR
LNDDGSLKSATPYVVFACTIDDQPLTDRARAIQWSETGEVTKTGKKRKAKKLPEGLVACAVDLGVRNLGFLTVAVASDNPGDGV
RVLRSRNLWLGEFEGDGQWSPGPHLAHIGAHKREIKRLRRLRGKPVKGEESHIELQQHIDGMGKDRFKKAARAIVNFALNVEDR
ASPRTGEVYPRADVLIVEKLAGFIPDAERERGINRALVAWNRGQLVTRLKEVAKDAGLKLFEVHPAGTSQCCSKCGALGRRYSI
VRDDETRAPVIRFGWVEKLFACPNLNCAGRKSMHCDQPFVCNADHNASVNLHRRFVMDDKAVAAFFAWKARPDGEREQSVRSID
DALRPQLERIHGLSASPLETPF (SEQ ID NO: 337)
>SRR5818194_megahit_k177_802550_7|M
[freshwater metagenome]
MKLLFKLRRGKIGKNKQQRDDYKRWFEYVIYNGAKNADYNLNALSINNWTPNTAKKYITKLMAGKNKIHAKGLDLVVSRIKSLS
DGGILAFDKDKIFIEIPYSFSQLIIRDAVAGISGHDALVKIWKEDHKKWRDEKKSWEDKTENKQYLKLQHIFKQFSDTAGGVGS
KKRGRWFTYLCWLSKQSALANWRGNGSFIEPFGEENCGKPSCNKGFKSKLIKESKKFFDANPELFEIHKLHQFYEKNFIRPKAK
KHNIDGFEHPPTFTLPDPVRHPIWACYNAPQTNPIGYKDLVLPKKYSGKSAGSFALNLLTGDIIDGKYPKEWVPFKFIADKRLS
CFKGKIKVVNNKIRTEYIFEDPHLSKKRQATIGGIKIILKDIKIDNLGHLLSATPYVVFACDVDNEPISEQAKKLKSEDTGETG
NSGLPIRKRILPEGCLISCAVDLGIRNLGFATLAESGGIPSECTHGDIKLLRSYNLLLEDGPSLEKIAKQKKLLGKFRRLRGKP
IKGEKSHVFLQNHITKMGVDRFNKAARLIVNFALNTEKKKNVQGIEYPRADVIVLENLAGLIPDAAKRKGINKALMNWNRGHLV
KRIQEIARDSGYLYRVYIMSPWGSSQVCCKCKGLGRRYSIIKDENGRQIQFGNGEKLFACANCRYMANADHNASINLHHIFKDK
DAVGFYKDYANKNEEEKQKIIDNLEAILRPHLQKMHFTTKKERSLDVPEHPLDVPF (SEQ ID NO: 305)
>SRR5818194_megahit_k177_802550_6|P
[freshwater metagenome]
MGTRAIKAKIICDKTTLGYLWRSHCMYNQKLSEYMKLLFKLRRGKIGKNKQQRDDYKRWFEYVIYNGAKNADYNLNALSINNWT
PNTAKKYITKLMAGKNKIHAKGLDLVVSRIKSLSDGGILAFDKDKIFIEIPYSFSQLIIRDAVAGISGHDALVKIWKEDHKKWR
DEKKSWEDKTENKQYLKLQHIFKQFSDTAGGVGSKKRGRWFTYLCWLSKQSALANWRGNGSFIEPFGEENCGKPSCNKGFKSKL
IKESKKFFDANPELFEIHKLHQFYEKNFIRPKAKKHNIDGFEHPPTFTLPDPVRHPIWACYNAPQTNPIGYKDLVLPKKYSGKS
AGSFALNLLTGDIIDGKYPKEWVPFKFIADKRLSCFKGKIKVVNNKIRTEYIFEDPHLSKKRQATIGGIKIILKDIKIDNLGHL
LSATPYVVFACDVDNEPISEQAKKLKSEDTGETGNSGLPIRKRILPEGCLISCAVDLGIRNLGFATLAESGGIPSECTHGDIKL
LRSYNLLLEDGPSLEKIAKQKKLLGKFRRLRGKPIKGEKSHVFLQNHITKMGVDRFNKAARLIVNFALNTEKKKNVQGIEYPRA
DVIVLENLAGLIPDAAKRKGINKALMNWNRGHLVKRIQEIARDSGYLYRVYIMSPWGSSQVCCKCKGLGRRYSIIKDENGRQIQ
FGNGEKLFACANCRYMANADHNASINLHHIFKDKDAVGFYKDYANKNEEEKQKIIDNLEAILRPHLQKMHFTTKKERSLDVPER
PLDVPF (SEQ ID NO: 306)
>SRR6481359_megahit_k177_1860565_4|M
[freshwater sediment metagenome]
MSVRSFQAKVECDKQIMEHLWRTHTVFNERLPVIIKILFQMKRGECGQNDKQKALYQNIAKSILDTNAQNADYLLNSVSIKGWK
PGAARKYNKGSFTWLDEAANLSSKGILVYDKDQVLGDIPLMMRQMICRQSVETIKSQQEILKNWENEYKEWLKKKEEWESQEDN
KKYLALRDKFEQFRKSYGGKKSKKRGRWHLYLKWLRDNPDLAAWRGGKAEINPISEKAQSRINKAKPNKKNAIELEEFLEANPE
IKKLDELHGYYERTFIRRRETRKGKELTGFKQKPTFTLPHSTTHPRWFVFNAPQTNPAGYRNLILPQKTGALGSLEMRLLNGDK
NNGDYPDDWINVRFKADPRLALMRGIKIQRIVRRGKDAGQTKESDSYKYFDKFLNKWRPATLSGVKLIFKFNPDKSVNTAYLYF
TCDITNEPLTETAKKIQWIETGEVTKKGKIRKKKVLPEGLISCAVDLGMRKGTTGFGTLCKYKNGKPYILRSRNLWIRYKEEKG
SHSGRWAEGPDLGHIAKHKREIRFLRRKRGKPIKGEKSHIKLQQHIDDMGEDRFKKAARAIVNFALNTENVAGKNGIYPRADIL
LLENLEGLIPDAERERGINRALAGWNRRHLVERIKEMAEDAGFRRRVFEIPPYGTSQVCSKCGSLGRRYTLGINEETGKREIHF
GYVEKLFACPNCGYCANADHNASVNLHRRFLIDDALKNYYEFKKLPEKKQKEAIAAIENSLKEKLSTIHKI (SEQ ID NO:
338)
>SRR6049666_megahit_k177_256604_1|P
[hot springs metagenome]
MATKSFEAKIVCKPDEKYTAEQKKQFLWFTHQVFNDGVRKVIPYVFKMKRGELGPEFQAIYYAITSSQDAIGKLEAVINPDWTS
GKIGKSDPNKWKELLKYQELEKGFRQRLKEEGIKSTKKFRKELEDEKKKLAKEIGQKDIWADAAAILRNKNLLLFNRDELLPNL
PSEFRRKIYEMTIQLIHGHQELVANWEDEHAEWLIEKDKWEEEHPEYMNVRPIFEKFEKEQGKVKGSRIRWLAYLDFLSSKPEL
ANWRGKAKETIPLTKEERAGFRKPGQHFAAFFNKNPELQELDRLHKEYQEKFARTQSKRTPHPDGFKHRPTFTLPDAMRHPVWY
SFKGATDPTKGSTYRNLDLENCTLDLKVLTAMEGEGRNPGGMIQYAFEPDERIKGFRYVGTTEKGKRAKGYIYYDPILEKERPA
KIQGIKLVFRPPRPDGTAYLIFSCQIEDEKPKIKIWKDKEEESPGEITKRKKTEVYPPELITLAIDFGQRHLGAITICKNNNGR
PEPIRFIPAYPKRRKDRESKPVSAWLAKIPGLTFNAVGMHEKEISAGMSRRFQDPKSIRQAGEKEGRKSKGQHIPETETPWAHL
REHIANMKEDHYKKAANLIIRTALQNGAQVILIENLRNYRPMLERTNLENRRRMQWAVRQTAKFLEDTARPLGLIVRQVSSAYT
SRFCSSCGHPGARVSLPGQKNWEKFYAEKYGKERKMIAVAGGQFFCCPACKKIINADINASLNMHKVFYQNFIWPGKIDKKDTK
NFIWQGKNYNWDQIADDVQSFLDQKAGIKKEDDIPY (SEQ ID NO: 330)
>SRR2080392_megahit_k177_207267_1|M
[hydrothermal vent metagenome]
MLVLPHGARGAASSIICPFGIKNISAKWDSPEYHGQTYYIMPIMKRRVIQAKISDTDPDTRQKIHLTHQIFNEYVKQTIKLFLS
IMNGTYDHPAYKTNKELYRRWMASIIFAGSGGGSINYDYLINSICKTKSKRHWEGASIPEKVTIPTVNQITDQKGKKTAKIEKE
EHDFKSFSSVDQIVELAKQQIYLFDKSEAFPLPSQIISAVISEAIAIIKQHRTLITKWYEDNGDFETEQAEFLNSPRYKSFLKI
KYIFDAFEQENKLRAERKRSQRKRSLRWERWDKYVNLLIDNSELMQWREKNTTLTIPPALNDPAKNKKSRLGILLRANPELGAL
HRTYVETWKDIPPQRPTFCWPDINEHPRFFTASSPPTSPYAYQRLSIDHKKSKATVEFFLLDGKRDKNGRYIGNFYLLRVVFDP
RINRFEHNPNAITKKGNKKPNSYYFLDPRTKKKREAHIKGCMLFLKKQKTSNHTSAYLTFNYAIERSNISEQAKKVRYDEKAKG
WKAPIGAIVASVDMMYKEIAFVTIAEKIKPQEFTILASRKIKLHRNQDNGFKGPQAKQIEQHQISLRDRKRNLPRKQYPQKLQN
HLNNMREEFSKRSARRILDFVMNLNKTIKDSQDKIIEQVDVILLERLKGLKPQKKNPRGLNRVLSNKRRPKVVTAIQEGCEIAG
ISCREIMPHYTSQICSKCGKLGRRFYENRKDVHEVERKMSPFGGKLFICPHCGYQANAEFNATINLLNIVLLNKRMTPEDKTNL
SPAEKRNYYTQLDDLAMKKLSPQKSPVKV (SEQ ID NO: 339)
>SRR2080392_megahit_k177_207267_2|P
[hydrothermal vent metagenome]
MKRRVIQAKISDTDPDTRQKIHLTHQIFNEYVKQTIKLFLSIMNGTYDHPAYKTNKELYRRWMASIIFAGSGGGSINYDYLINS
ICKTKSKRHWEGASIPEKVTIPTVNQITDQKGKKTAKIEKEEHDFKSFSSVDQIVELAKQQIYLFDKSEAFPLPSQIISAVISE
AIAIIKQHRTLITKWYEDNGDFETEQAEFLNSPRYKSFLKIKYIFDAFEQENKLRAERKRSQRKRSLRWERWDKYVNLLIDNSE
LMQWREKNTTLTIPPALNDPAKNKKSRLGILLRANPELGALHRTYVETWKDIPPQRPTFCWPDINEHPRFFTASSPPTSPYAYQ
RLSIDHKKSKATVEFFLLDGKRDKNGRYIGNFYLLRVVFDPRINRFEHNPNAITKKGNKKPNSYYFLDPRTKKKREAHIKGCML
FLKKQKTSNHTSAYLTFNYAIERSNISEQAKKVRYDEKAKGWKAPIGAIVASVDMMYKEIAFVTIAEKIKPQEFTILASRKIKL
HRNQDNGFKGPQAKQIEQHQISLRDRKRNLPRKQYPQKLQNHLNNMREEFSKRSARRILDFVMNLNKTIKDSQDKIIEQVDVIL
LERLKGLKPQKKNPRGLNRVLSNKRRPKVVTAIQEGCEIAGISCREIMPHYTSQICSKCGKLGRRFYENRKDVHEVERKMSPFG
GKLFICPHCGYQANAEFNATINLLNIVLLNKRMTPEDKTNLSPAEKRNYYTQLDDLAMKKLSPQKSPVKV (SEQ ID NO:
340)
>3300025517|Ga0207869_1001046_11|M
[lab enrichment-defined media-ionic liquid and high solid enriched]
MGVKAWKAKIIVADPDLAAALDHIVRQWNLWAEQACIAIMRLRRGDYGDEGQAVWRFLSEKGTFGTSILDKITRVTGRGIKNDE
ERTIASNFLSRHGPFEPLRAARDALGPNFWYQFQRAVRERIESHDAKLRQWREDHAEWIETRRTWEEEHRAYMNVRPVIEAFEA
AEGQSGRRRGRWRRWLDFLSSHPELAAWRGGPATIVPLSKEELAACRRRRRRAVAEQARLFFEKNPELRALNREHDEYQEKFAR
PWAKRRNPDGFRHRPTFTLPHPDSHPDWPRFKGNAGWRDLSVPDRIVSLELLCPDGSRRWFNVRFVPDPRLASLRPATQPVRQG
NTTYHYVSDALGVAEQPVQPQGIKLILRPDGAYLSVSVSVLAPPCGFDVRQSAIEKYGSIWACRKYKQDHPDRPLVTCAVDLAV
RHNGALTVARDGEVFARRLLHNRFFLPGDDRERAMNIPSLLEIAAVKRQLRRARRQTGRIAPGKPSCARLQAHYRALCEDRYKK
LVAAIFAYARHHGAEVVIFEDLKNLLPNAVNERGVNRALQSWNRGAIVRFARQSAEDVGLRVATVPAFHTSIVCARCGALGCRF
EQTREGVRIAKLGPWFGCRACGRRIHADLNASENLHKVLIGTFPQVRRISRDPPVLSIADVRVDQREADRLAAAWLSELSVGPT
PF (SEQ ID NO: 301)
>3300025572|Ga0207864_1000213_47|M
[lab enrichment-defined media-ionic liquid and high solid enriched]
MGVKAWKAKIIVADPDLAAALDHIVRQWNLWAEQACIAIMRLRRGDYGDEGQAVWRFLSEKGTFGTSILDKITRVTGRGIKNDE
ERTIASNFLSRHGPFEPLRAARDALGPNFWYQFQRAVRERIESHDAKLRQWREDHAEWIETRRTWEEEHRAYMNVRPVIEAFEA
AEGQSGRRRGRWRRWLDFLSSHPELAAWRGGPATIVPLSKEELAACRRRRRRAVAEQARLFFEKNPELRALNREHDEYQEKFAR
PWAKRRNPDGFRHRPTFTLPHPDSHPDWPRFKGNAGWRDLSVPDRIVSLELLCPDGSRRWFNVRFVPDPRLASLRPATQPVRQG
NTTYHYVSDAIGVAEQPVQPQGIKLILRPDGAYLSVSVSVLAPPCGFDVRQSAIEKYGSIWACRKYKQDHPDRPLVTCAVDLAV
RHNGALTVARDGEVFARRLLHNRFFLPGDDRERAMNIPSLLEIAAVKRQLRRARRQTGRIAPGKPSCARLQAHYRALCEDRYKK
LVAAIFAYARHHGAEVVIFEDLKNLLPNAVNERGVNRALQSWNRGAIVRFARQSAEDVGLRVATVPAFHTSIVCARCGALGCRF
EQTREGVRIAKLGPWFGCRACGRRIHADLNASENLHKVLIGTFPQVRRISRDPPVLSIADVRVDQREADRLAAAWLSELSVGPT
PF (SEQ ID NO: 341)
>3300025572|Ga0207864_1014515_2|P
[lab enrichment-defined media-ionic liquid and high solid enriched]
MGIKSWRVKLWVESPEIRATLEYCLSLWNTSAALLCRHVLAMRRGDFGPEGQAIWEHLKKTPHNFHVLYPISNGSGIEKTTRYY
PDARAFVNKYGYGALGPVRSASGCLWKQLTKAVRERTHSYDKTCEKWSEEHSKWLEERAKWEAEHPEYMAIRPLIDTFHAKHGV
TRGRRNRWALWLQFLMETPELVRWRNKTAKVVPLTDSELKRIRSKRRGAARREQALFYEKNPELAELNRIRGIYERRFARSAAK
RKNPDGFRHRPTFTLPSEAKYPDWPRFQAGEGWRDLDLDRRTICLKLPTDGGSARWVQVHFVPDPRLQRLARLKQPVKEGATRY
DYSLDMPSGHTVLAQPQEVRLIRRGSSYFATIRLSLHSAPSAIPVPQTAASSPAGMLRKIRTDAPELKLITCAVDLGVRHLGAA
TIAREGEIIGRRILHNRFLAPGADGGVINIPSLPQIAQVRRQIRCAQRRSGRISPKVAGCRHLWTHYRHLCEDRYKKAVAAIFG
FARAHGAHIVLFEDLKMLNPDSANERGVNRALQNWNRGRIVEFAKNTAEDAGLCVVTVPAYWTSRICARCNAFGVRFNQGQRRK
PGDDGHVSRVACELDFLGHWFLCPSCGRSVHADLNASENLHRVFLGTFPTVQTIQRQPRIYEINGQRVALDEIQQRAVEILASR
RAGDTPF (SEQ ID NO: 332)
>3300025572|Ga0207864_1014515_3|M
[lab enrichment-defined media-ionic liquid and high solid enriched]
MRRGDFGPEGQAIWEHLKKTPHNFHVLYPISNGSGIEKTTRYYPDARAFVNKYGYGALGPVRSASGCLWKQLTKAVRERTHSYD
KTCEKWSEEHSKWLEERAKWEAEHPEYMAIRPLIDTFHAKHGVTRGRRNRWALWLQFLMETPELVRWRNKTAKVVPLTDSELKR
IRSKRRGAARREQALFYEKNPELAELNRIHGIYERRFARSAAKRKNPDGFRHRPTFTLPSEAKYPDWPRFQAGEGWRDLDLDRR
TICLKLPTDGGSARWVQVHFVPDPRLQRLARLKQPVKEGATRYDYSLDMPSGHTVLAQPQEVRLIRRGSSYFATIRLSLHSAPS
AIPVPQTAASSPAGMLRKIRTDAPELKLITCAVDLGVRHLGAATIAREGEIIGRRILHNRFLAPGADGGVINIPSLPQIAQVRR
QIRCAQRRSGRISPKVAGCRHLWTHYRHLCEDRYKKAVAAIFGFARAHGAHIVLFEDLKMLNPDSANERGVNRALQNWNRGRIV
EFAKNTAEDAGLCVVIVPAYWTSRICARCNAFGVRFNQGQRRKPGDDGHVSRVACELDFLGHWFLCPSCGRSVHADLNASENLH
RVFLGTFPTVQTIQRQPRIYEINGQRVALDEIQQRAVEILASRRAGDTPF (SEQ ID NO: 342)
>SRR6505097_megahit_k177_377355_35|M
[permafrost metagenome]
MGVRALRARIECDRETLLHLWRTHCAFNQRLLSILTKLFGMRRGELGETAARRALYQRVARFLLARDSKDAPYLLNSVSIQGWK
PATALKMKVRMPAPDGTLAEVSADTWAPEAAKLSAHGTLAYDKEAVRDGLPDSLFQPMLRDAVAYISGHIELARNWEAEHADWL
KAKAEWEEKDERKKYLALRPRFDAFEQSVGGKAGKRRERWHLYLTWLRENPALAAWRGGPPAVHPLDAKATARVAKAKPWKKRS
VEADEFWKANPELRELDKLHGYYEREFVRRRKTKKNPDGFDHRPTFTLPHAVLHPRWTLFNAPQTSPQGYADLRLPQRPGTLGS
VKLRLLTGEKAPDGCPNEWVGVQFRADPRLSQFAERAEAQEIRKGKKKGTQKTVRVFRFVDQQLNCERPAQISGAKLIFKNVKL
NDDGSLKSATPYLVFACTIDNLPLTEHARAIQWSETGEVTKTGKKRKAKKLPTGLVTCAVDLGLRNLAFLTLATSGEGPQNNTH
DGIRVLRSRNQWLALEETAGTHPGRWSAGPDLAHIAAHKREIRRLRRLRGKPVKGQQSHVELQGHIDHMGQDRFKKAARAIVNF
ALNVDRAAGQSGQPYPRADLLIVEKLEGFIPDAARERGINRALVAWNRGQLVTRIKEVAADAGLKLFPVHPAGTSQCCSRCGAL
GRRYSIVRDQQTGVPAIRFGWVEKLFACPNRECPGRAPDKPDQPFTCNADHNASLNLHRRFVLDDRAVAAFFAWKNKTNAERER
ELTQMDQALRPELEKLHRLPLAELATPF (SEQ ID NO: 343)
>SRR6962291_megahit_k177_1754533_5|M
[permafrost metagenome]
MKRGDSGTTDAQKHLYSQIARFVLARSSRDAPYLMNSISIRGWTPNTAKKKMKATLMGPDGQEVETSGDDWADAAAALSAEGTL
LYDKSELLGDVPDTLRQVVVRECAAIISGHEELVRAWELSHEEWLEQKAKWESDPEHERYMVLRPQFETFEQSVGGKAGKRRGR
WQRYLDWLRSNPELAAWRGGPATVVELPAAARERVRKARPSKVRSVEAEEFWKVNPELFELDRLHGFYEREFVRRRKTKKHPDG
FDHRPTFTLPDPVRHPRWFVFNAPQTSPQGYRKLSLPKKNGDFGTIELLLLTGEKTDAKYPNGWNQVRFAADPRLSDFKQISKK
RQIRKGKTKGQETDSNAFTFLDRQISMERPAQISGAKLLFKKVRLKSDGALLSADPYLVFTCNITDVPFTDAARAIKWEDAGER
RKRAVIPAGLITCAVDLGIRHVGFATIAAKDEARPEGLRVLRSRNVWMGHEEQKGRHPGRWSPGPELPHLASHKRSLRRLRRLR
GKPVKDESSHAELQGHITNMANDRFKKAAREIVNFALNVERKVDPRTGEPYSRADLLVVENLANLIPDSERERGINRALIEFNR
GHLVDRIAEVAKDCGLKLMKVSPVGTSQVCCRCGALGRRYSIQRDRDSGYADIRFGFVEALFACPHCGYRANADHNASINLHRR
FLLGEAAIRGFKEWQQGSRQERADTVRRIEESLVAPLRLMHRLEVADMPF (SEQ ID NO: 344)
>SRR6962291_megahit_k177_1754533_5|P
[permafrost metagenome]
MSTRAIQSRIQCDHQTLEHLWRTHVVFNRRLPPLISLLFRMKRGDSGTTDAQKHLYSQIARFVLARSSRDAPYLMNSISIRGWT
PNTAKKKMKATLMGPDGQEVETSGDDWADAAAALSAEGTLLYDKSELLGDVPDTLRQVVVRECAAIISGHEELVRAWELSHEEW
LEQKAKWESDPEHERYMVLRPQFETFEQSVGGKAGKRRGRWQRYLDWLRSNPELAAWRGGPATVVELPAAARERVRKARPSKVR
SVEAEEFWKVNPELFELDRLHGFYEREFVRRRKTKKHPDGFDHRPTFTLPDPVRHPRWFVFNAPQTSPQGYRKLSLPKKNGDFG
TIELLLLTGEKTDAKYPNGWNQVRFAADPRLSDFKQISKKRQIRKGKTKGQETDSNAFTFLDRQISMERPAQISGAKLLFKKVR
LKSDGALLSADPYLVFTCNITDVPFTDAARAIKWEDAGERRKRAVIPAGLITCAVDLGIRHVGFATIAAKDEARPEGLRVLRSR
NVWMGHEEQKGRHPGRWSPGPELPHLASHKRSLRRLRRLRGKPVKDESSHAELQGHITNMANDRFKKAAREIVNFALNVERKVD
PRTGEPYSRADLLVVENLANLIPDSERERGINRALIEFNRGHLVDRIAEVAKDCGLKLMKVSPVGTSQVCCRCGALGRRYSIQR
DRDSGYADIRFGFVEALFACPHCGYRANADHNASINLHRRFLLGEAAIRGFKEWQQGSRQERADTVRRIEESLVAPLRLMHRLE
VADMPF (SEQ ID NO: 345)
>SRR6962291_megahit_k177_3367137_15|M
[permafrost metagenome]
MFNRRLPDLISLLFRMRRGECGETEQASRLYSQVASFILARGSKDAPYLLNSVSVRGWKPHTAKKMKARALGPDGQQIELAGED
WADPAAALSAEGRLLYDKTELLGDVPDTLRQMAARECVAIISGHEELVRAWEKAHEEWLASKAKWESDPENQFYLGLRARFDEF
EQSVGGKVGKRRGRWQRYLDWLRANPDLAAWRGGPAAVVELSAGAKERIRKAKPRKVRSVEAEEFWKVNSELAALDRLHGYYER
EFVRRRKTKKHPDGFDHRPTFTLPHPVRHPRWFVFNAPQTSPQGYRKLCLPSSGGHTGTVELLLLTGEKADNKYPSGWETVRFA
ADPRLSDFKAITKRRQVLKGKTKGQETDTKAFTFLDRQINLERPAQISGVKLIFKGVRQNHDGSLLSAHPYLVFTCNVADVPLT
DGAKKIKWEDTGERRKRVVVPAGLIACAVDLGIRHVGFATVATQDAESGGLHVLRSRNIWIGQEEEKGRNPGRWSPGPDLAHLS
AHKRSLRHLRGLRGKPVKGENSHIELQDHITNMASDRFKKAAREIVNFALNADSKVDPRTGEPYPRADVLVLENLANLLPDSER
ERGINRALIEFNRGHLADRIVEVAKDCGLKVMMVSPVGTSQVCCRCGALGRRYSLRRHQDGGYTDIHFGFVEPLFACPSCGYRA
NSDHNASVNLHRRFRLGEAAIAKFKEWQKGTKPERDEVLRRIEQSLVGPLREMHRLAVADTPF (SEQ ID NO: 346)
>SRR6962291_megahit_k177_3367137_14|P
[permafrost metagenome]
MSTRALQSRIQCDHQTLEHLWRTHLVFNRRLPDLISLLFRMRRGECGETEQASRLYSQVASFILARGSKDAPYLLNSVSVRGWK
PHTAKKMKARALGPDGQQIELAGEDWADPAAALSAEGRLLYDKTELLGDVPDTLRQMAARECVAIISGHEELVRAWEKAHEEWL
ASKAKWESDPENQFYLGLRARFDEFEQSVGGKVGKRRGRWQRYLDWLRANPDLAAWRGGPAAVVELSAGAKERIRKAKPRKVRS
VEAEEFWKVNSELAALDRLHGYYEREFVRRRKTKKHPDGFDHRPTFTLPHPVRHPRWFVFNAPQTSPQGYRKLCLPSSGGHTGT
VELLLLTGEKADNKYPSGWETVRFAADPRLSDFKAITKRRQVLKGKTKGQETDTKAFTFLDRQINLERPAQISGVKLIFKGVRQ
NHDGSLLSAHPYLVFTCNVADVPLTDGAKKIKWEDTGERRKRVVVPAGLIACAVDLGIRHVGFATVATQDAESGGLHVLRSRNI
WIGQEEEKGRNPGRWSPGPDLAHLSAHKRSLRHLRGLRGKPVKGENSHIELQDHITNMASDRFKKAAREIVNFALNADSKVDPR
TGEPYPRADVLVLENLANLLPDSERERGINRALIEFNRGHLADRIVEVAKDCGLKVMMVSPVGTSQVCCRCGALGRRYSLRRHQ
DGGYTDIHFGFVEPLFACPSCGYRANSDHNASVNLHRRFRLGEAAIAKFKEWQKGTKPERDEVLRRIEQSLVGPLREMHRLAVA
DTPF (SEQ ID NO: 347)
>AQT69685.1
[Phycisphaerae bacterium ST-NAGAB-D1]
MATKSYRARILTDSRLAAALDRTHVVFVESLKQMINTYLRMQNGKFGPDHKKLAQIMLSRSNTFAHGVMDQITRDQPTSTLDEE
WTDLARRIHKTTGPLFLQAERFATVKNRAIHTKSRGKVIPSPETLAVPAKFWHQVCDSASAYIRSNRELMQQWRKDRAAWLKDK
NEWQQKHPEFMQFYNGPYQNFLKLCDDDRITSQLAAEQQPTASKNNRPRKTGKRFARWHLWYKWLSENPEIIEWRNKASASDFK
TVTDDVRKQIITKYPQQNKYITRLLDWLEDNNPELKTLENLRRTYVKKFDSFKRPPTLTLPSPYRHPYWFTMELDQFYKKADFE
NGTIQLLLIDEDDDGNWFFNWMPASLKPDPRLVPSWRAETFETEGRFPPYLGGKIGKKLSRPAPTDAERKAGIAGAKLMIKNNR
SELLFTVFEQDCPPRVKWAKTKNRKCPADNAFSSDGKTRKPLRILSIDLGIRHIGAFALTQGTRNDSAWQTESLKKGIINSPSI
PPLRQVRRHDYDLKRKRRRHGKPVKGQRSNANLQAHRTNMAQDRFKKGASAIVSLAREHSADLILFENLHSLKFSAFDERWMNR
QLRDMNRRHIVELVSEQAPEFGITVKDDINPWMTSRICSNCNLPGFRFSMKKKNPYREKLPREKCTDFGYPVWEPGGHLFRCPH
CDHRVNADINAAANLANKFFGLGYWNNGLKYDAETKTFTVHTDKKTPPLIFKPRPQFDLWADSVKTRKQLGPDPF (SEQ ID
NO: 348)
>PMBN01000097_4|M
[Phycisphaerales bacterium]
MGVRALRARIECDRETLLHLWRTHCAFNQRLLSILTKLFGMRRGELGETAARRALYQRVARFLLARDSKDAPYLLNSVSIQGWK
PATALKMKVRMPAPDGTLAEVSADTWAPEAAKLSAHGTLAYDKEAVRDGLPDSLFQPMLRDAVAYISGHIELARNWEAEHADWL
KAKAEWEEKDERKKYLALRPRFDAFEQSVGGKAGKRRERWHLYLTWLRENPALAAWRGGPPAVHPLDAKATARVAKAKPWKKRS
VEADEFWKANPELRELDKLHGYYEREFVRRRKTKKNPDGFDHRPTFTLPHAVLHPRWTLFNAPQTSPQGYADLRLPQRPGTLGS
VKLRLLTGEKAPDGCPNEWVGVQFRADPRLSQFAERAEAQEIRKGKKKGTQKTVRVFRFVDQQLNCERPAQISGAKLIFKNVKL
NDDGSLKSATPYLVFACTIDNLPLTEHARAIQWSETGEVTKTGKKRKAKKLPTGLVTCAVDLGLRNLAFLTLATSGEGPQNNTH
DGIRVLRSRNQWLALEETAGTHPGRWSAGPDLAHIAAHKREIRRLRRLRGKPVKGQQSHVELQGHIDHMGQDRFKKAARAIVNF
ALNVDRAAGQSGQPYPRADLLIVEKLEGFIPDAARERGINRALVAWNRGQLVTRIKEVAADAGLKLFPVHPAGTSQCCSRCGAL
GRRYSIVRDQQTGVPAIRFGWVEKLFACPNRECPGRAPDKPDQPFTCNADHNASLNLHRRFVLDDRAVAAFFAWKNKTNAERER
ELTQMDQALRPELEKLHRLPLAELATPF (SEQ ID NO: 343)
>PMDC01000375_4|M
[Phycisphaerales bacterium]
MGVRALRARIECDRETLLHLWRTHCAFNQRLLSILTKLFGMRRGELGETAARRALYQRVARFLLARDSKDAPYLLNSVSIQGWK
PATALKMKVRMPAPDGTLAEVSADTWAPEAAKLSAHGTLAYDKEAVRDGLPDSLFQPMLRDAVAYISGHIELARNWEAEHADWL
KAKAEWEEKDERKKYLALRPRFDAFEQSVGGKAGKRRERWHLYLTWLRENPALAAWRGGPPAVHPLDAKATARVAKAKPWKKRS
VEADEFWKANPELRELDKLHGYYEREFVRRRKTKKNPDGFDHRPTFTLPHAVLHPRWTLFNAPQTSPQGYADLRLPQRPGTLGS
VKLRLLTGEKAPDGCPNEWVGVQFRADPRLSQFAERAEAQEIRKGKKKGTQKTVRVFRFVDQQLNCERPAQISGAKLIFKNVKL
NDDGSLKSATPYLVFACTIDNLPLTEHARAIQWSETGEVTKTGKKRKAKKLPTGLVTCAVDLGLRNLAFLTLATSGEGPQNNTH
DGIRVLRSRNQWLALEETAGTHPGRWSAGPDLAHIAAHKREIRRLRRLRGKPVKGQQSHVELQGHIDHMGQDRFKKAARAIVNF
ALNVDRAAGQSGQPYPRADLLIVEKLEGFIPDAARERGINRALVAWNRGQLVTRIKEVAADAGLKLFPVHPAGTSQCCSRCGAL
GRRYSIVRDQQTGVPAIRFGWVEKLFACPNRECPGRAPDKPDQPFTCNADHNASLNLHRRFVLDDRAVAAFFAWKNKTNAERER
ELTQMDQALRPELEKLHRLPLAELATPF (SEQ ID NO: 343)
>pMMM01000072_9|M
[Phycisphaerales bacterium]
MGVRALRARIECDRETLLHLWRTHCAFNQRLLSILTKLFGMRRGELGETAARRALYQRVARFLLARDSKDAPYLLNSVSIQGWK
PATALKMKVRMPAPDGTLAEVSADTWAPEAAKLSAHGTLAYDKEAVRDGLPDSLFQPMLRDAVAYISGHIELARNWEAEHADWL
KAKAEWEEKDERKKYLALRPRFDAFEQSVGGKAGKRRERWHLYLTWLRENPALAAWRGGPPAVHPLDAKATARVAKAKPWKKRS
VEADEFWKANPELRELDKLHGYYEREFVRRRKTKKNPDGFDHRPTFTLPHAVLHPRWTLFNAPQTSPQGYADLRLPQRPGTLGS
VKLRLLTGEKAPDGCPNEWVGVQFRADPRLSQFAERAEAQEIRKGKKKGTQKTVRVFRFVDQQLNCERPAQISGAKLIFKNVKL
NDDGSLKSATPYLVFACTIDNLPLTEHARAIQWSETGEVTKTGKKRKAKKLPTGLVTCAVDLGLRNLAFLTLATSGEGPQNNTH
DGIRVLRSRNQWLALEETAGTHPGRWSAGPDLAHIAAHKREIRRLRRLRGKPVKGQQSHVELQGHIDHMGQDRFKKAARAIVNF
ALNVDRAAGQSGQPYPRADLLIVEKLEGFIPDAARERGINRALVAWNRGQLVTRIKEVAADAGLKLFPVHPAGTSQCCSRCGAL
GRRYSIVRDQQTGVPAIRFGWVEKLFACPNRECPGRAPDKPDQPFTCNADHNASLNLHRRFVLDDRAVAAFFAWKNKTNAERER
ELTQMDQALRPELEKLHRLPLAELATPF (SEQ ID NO: 343)
>QBM02859.1
[Planctomycetes bacterium RBG_13_46_10]
MSVRSFQARVECDKQTMEHLWRTHKVFNERLPEIIKILFKMKRGECGQNDKQKSLYKSISQSILEANAQNADYLLNSVSIKGWK
PGTAKKYRNASFTWADDAAKLSSQGIHVYDKKQVLGDLPGMMSQMVCRQSVEAISGHIELTKKWEKEHNEWLKEKEKWESEDEH
KKYLDLREKFEQFEQSIGGKITKRRGRWHLYLKWLSDNPDFAAWRGNKAVINPLSEKAQIRINKAKPNKKNSVERDEFFKANPE
MKALDNLHGYYERNFVRRRKTKKNPDGFDHKPTFTLPHPTIHPRWFVFNKPKTNPEGYRKLILPKKAGDLGSLEMRLLTGEKNK
GNYPDDWISVKFKADPRLSLIRPVKGRRVVRKGKEQGQTKETDSYEFFDKHLKKWRPAKLSGVKLIFPDKTPKAAYLYFTCDIP
DEPLTETAKKIQWLETGDVTKKGKKRKKKVLPHGLVSCAVDLSMRRGTTGFATLCRYENGKIHILRSRNLWVGYKEGKGCHPYR
WTEGPDLGHIAKHKREIRILRSKRGKPVKGEESHIDLQKHIDYMGEDRFKKAARTIVNFALNTENAASKNGFYPRADVLLLENL
EGLIPDAEKERGINRALAGWNRRHLVERVIEMAKDAGFKRRVFEIPPYGTSQVCSKCGALGRRYSIIRENNRREIRFGYVEKLF
ACPNCGYCANADHNASVNLNRRFLIEDSFKSYYDWKRLSEKKQKEEIETIESKLMDKLCAMHKISRGSISK (SEQ ID NO:
349)
>SRR6963308_megahit_k177_1876783_1|M
[sediment metagenome]
MSQRALAVRLLVDSEDDRAALWRTHRIFNERLGWVLRQMHRMKRGEPDARYAEIFNAITTSQRATAALEAVTSLAWTGTKEDRW
CQLARALIQEGTLLFDREARLAGLSKEFRRKLFEAAFQMISGHRELLAQWERDHNEWQQARETWEAENPEYMAIRPALQRFEAE
HGQAAKRRARWHKWRAFLQGSSQLAGWRGGPQVVNEISADARRRIERARRNKRNKIEAEEFFRVNPELKELDAKHGYYQREFLR
PWAKRRNADGFKHRPTFTEPSAENHPFWFQFKKHETYKDLNLKVRSLRLKLLASDSAVPGSQWRDFRFRVDPRLLDLSEAQSPA
KIGIARFSLLFNDRALAMEDRPAEIRGAKLIFRPAQRDGRVYLSFTCDVADLPCRVPLKQESWDKYSAEWLCKKSREALDGEDP
VTCAVDLGIRRLGAASVRRDGKIVRARIIREEQQRGCGPRLAAIKNHKRALKAGRRKRGKPVRGEQSLVELQEHVDKMGRDRFK
KGARRIVNFAHQNHCDVIVMEKLAGLIPDAERERGINSALVNWNRGHLVKWVKQLANDAGMRVVEVYPHWTSQLCSRCGAMGAR
FSADHGHVAFEYVGSLFACADCGYVANADHNASVNLHRRFYGELPKVKKLREGVYELAKPDHAPKEVKLAELRSAVSVAAAAMC
RGQASPF (SEQ ID NO: 325)
>SRR6963352_megahit_k177_1225001_5|P
[sediment metagenome]
MSVKTIQAKLECDRETLETLWRTHTVFNEGLLPILALFFKMKRRETGSTEEEKDLYKRICEFILRTNASNPGYLLNSVCLENWK
PDSARKTKAEVVRDGKKEKISAEEWIDDLLNMKEESGLLFLKQELLNGLPIMFFEKLVAESKAILSAYEELQYQWEVDHNKWLK
EKEGWEKKHKEYLAVRSLFQKFEQEVKGKITKKRRRWHLYKDWMKRTPELVAWRGKETKVYGLTEEDREAIKKAPLKKKIGVEV
GLFFKRNPELSALDKLHSYYEEKFVRRGKKKRNCDGYEHRPTFTLPHSVKHPRWYVFSGPQTGNGYKNLNIPERKKDFGQLDLL
VLTDDKVDGEYPREYRTVKFRGDHRFLDIRGATRTRLVTKGKNKGQEVEEKFAYEMYDRYLKIWRPLKISGAKLAFRDIKINQD
GSLKSAVPYLWFTLNLEDLPISEKAKEIKWVETDEVKDNGDKRKKIQIPEGLITCAVNIGIRNLGFGTLAVGEKGKARILRSRN
IWIGEEEKTGKHKGRWQKGPTLRELRDHKQEIRRLRKLRGKVVKGERSHIKLQNHITNFADDRLKKAARKILNFALNVENHIDK
KTGKPYPRADVLLLEDLSTLVPTTKKRRDQNQLLIEFMHRGTLSKIEEMAKDAGLKVLRIKPGGISQVCPKCGGIGRRYEIRID
QETKKPDIHFTDVIDDIDCQKLFVCASCSYRGNGDHVASVNLHRKFYDWSVVDKYFTLLRSDNYKEQKKVIEEELREFLRKEHF
PQMALN (SEQ ID NO: 329)
>SRR6963480_megahit_k177_1813084_1|M
[sediment metagenome]
MSVKTIQAKLECDRETLETLWRTHTVFNEGLLPILALFFKMKRRETGSTEEEKDLYKRICEFILRTNASNPGYLLNSVCLENWK
PDSARKTKAEVVRDGKKEKISAEEWIDDLLNMKEESGLLFLKQELLNGLPIMFFEKLVAESKAILSAYEELQYQWEVDHNKWLK
EKEGWEKKHKEYLAVRSLFQKFEQEVKGKITKKRRRWHLYKDWMKRTPELVAWRGKETKVYGLTEEDREAIKKAPLKKKIGVEV
GLFFKRNPELSALDKLHSYYEEKFVRRGKKKRNCDGYEHRPTFTLPHSVKHPRWYVFSGPQTGNGYKNLNIPERKKDFGQLDLL
VLTDDKVDGEYPREYRTVKFRGDHRFLDIRGATRTRLVTKGKNKGQEVEEKFAYEMYDRYLKIWRPLKISGAKLAFRDIKINQD
GSLKSAVPYLWFTLNLEDLPISEKAKEIKWVETDEVKDNGDKRKKIQIPEGLITCAVNIGIRNLGFGTLAVGEKGKARILRSRN
IWIGEEEKTGKHKGRWQKGPTLRELRDHKQEIRRLRKLRGKVVKGERSHIKLQNHITNFADDRLKKAARKILNFALNVENHIDK
KTGKPYPRADVLLLEDLSTLVPTTKKRRDQNQLLIEFMHRGTLSKIEEMAKDAGLKVLRIKPGGISQVCPKCGGIGRRYEIRID
QETKKPDIHFTDVIDDIDCQKLFVCASCSYRGNGDHVASVNLHRKFYDWSVVDKYFTLLRSDNYKEQKKVIEEELREFLRKEHF
PQMALN (SEQ ID NO: 329)
>SRR6963491_megahit_k177_4304123_3|P
[sediment metagenome]
MTIKSFEAKIVTNPSLRETLEYTHRVYNEDLKYMVEVLLAMRKGKHGDGYVEFWREHLQKAANPSGLLEPLTTPDGPKADAKSK
KSKIIRQLFKEHGMLFDRDERWPHWNARHRRHLFDDAKKWARQLDERLERWRSEHAQWLKEKEKFENENPLYMAVEPLFGGFFK
EFGQGGKRRERWAAYYHFLLAHPELANWRGQADAIVPLTPEEEAACLRDRRRGVKKRLDLFLEKNPELEALHKLDAKYGRNMVR
RSARHRNIDGFRHPPTMTLPHSRLHPEWITFQAGETYKDLDLNGGTVRLNILPPDAETSKLHSVEFRAEKRLRRITPRETPLRK
GRNEFNKNYRDAADRVHPARVKGIRLILRPRGAYLKITVELDRPESRTGLKQQTCDKYSSNWCYQEIVKRREGKPLKCLSLDLG
VRHLAVGVVVQETRANGDRETVIEGVRFFKEVGGRPFPSLDEIRRHKDRLREKRSQTRRAPKGRRTCIALQDHVTKMGQDRYRK
GAAAIVRYAVERDVDVILLEKLAGFIPDAAKQRGINKALMEWNRRKIADFVKLLAADHGISVVEVAPHHLSQLCSKCGELGRRF
SWKDGLPKFGTVEKLFVCPACGYQANSDYNAAVNLYKAFSGAYEERPKKAKKGVYKYRDRTICLKKLDGQLAERLTQEQTPF
(SEQ ID NO: 328)
>SRR6963587_megahit_k177_2272343_29|M
[sediment metagenome]
MATKTYRARIVQISPRLGAALERTHYLFAEALNQMVRRYIDMRKGKYGQECKKLADIMLTRSNTFAHGVMDQLTREISTSGLTD
EWVDLARAVHKSHGPLFLQHDGFAEVDGVMLHTKRHGKVSPMPGRLPVNAKFWHQVCDSASAFLKSNNELLENWRQGRKEWLQE
KADWESANADFMRFWNGSYQEFEETCEIKRKESQALEGQKVVEKKRHRRDRGKRMSRWHLWYNWVITHPEIIEWRNRAKAAEFR
PVPPTVHKKIKNKYPRQDKHITKFLDWLKENNPELKALDSRRRFYVRNYLRFRRPPTLTLPSANKHPYWFTFELNQFYKNVDFD
KGSIQLLLVDETEEGSWFFRWFDAKIQCDPRLRPCVRAGVFATKGRYPPYIGGKVGNKLNRPAERPENRKAGYAGAKLVLNKRR
KELFFTVIEQDCPRKVSWKKTKQRTCRGDNVFAKDGSQIPLKVMAIDLGIRHIGAYVIAEACRNRGVWDISWQHKGITGRHAVP
GLKEIRQHDRQLRKARSQRGKPVQGEESFIELQDHRTNMADDRFKKAANTIVELARQYDVHLILFERLGNLSPTAFDERWMNRQ
LRDMNRRQIVDTVKLQAREFGIECLEDISPWMTSHICSRCFKPGWRFSIKRKNPYGERFTRKNCRDYGYPVWDTGGHLFRCPHC
EYKCNADINAACNVAAKFFGLWSGLDGLKRDQWVYTWQENQPKTFDAKKTFLEWALDVRNRKLMGDSPF (SEQ ID NO:
326)
>SRR6963591_megahit_k177_1621237_2|P
[sediment metagenome]
MATKTYRARIVQISPRLGAALERTHYLFAEALNQMVRRYIDMRKGKYGQECKKLADIMLTRSNTFAHGVMDQLTREISTSGLTD
EWVDLARAVHKSHGPLFLQHDGFAEVDGVMLHTKRHGKVSPMPGRLPVNAKFWHQVCDSASAFLKSNNELLENWRQGRKEWLQE
KADWESANADFMRFWNGSYQEFEETCEIKRKESQALEGQKVVEKKRHRRDRGKRMSRWHLWYNWVITHPEIIEWRNRAKAAEFR
PVPPTVHKKIKNKYPRQDKHITKFLDWLKENNPELKALDSRRRFYVRNYLRFRRPPTLTLPSANKHPYWFTFELNQFYKNVDFD
KGSIQLLLVDETEEGSWFFRWFDAKIQCDPRLRPCVRAGVFATKGRYPPYIGGKVGNKLNRPAERPENRKAGYAGAKLVLNKRR
KELFFTVIEQDCPRKVSWKKTKQRTCRGDNVFAKDGSQIPLKVMAIDLGIRHIGAYVIAEACRNRGVWDISWQHKGITGRHAVP
GLKEIRQHDRQLRKARSQRGKPVQGEESFIELQDHRTNMADDRFKKAANTIVELARQYDVHLILFERLGNLSPTAFDERWMNRQ
LRDMNRRQIVDTVKLQAREFGIECLEDISPWMTSHICSRCFKPGWRFSIKRKNPYGERFTRKNCRDYGYPVWDTGGHLFRCPHC
EYKCNADINAACNVAAKFFGLWSGLDGLKRDQWVYTWQENQPKTFDAKKTFLEWALDVRNRKLMGDSPF (SEQ ID NO:
326)
>SRR8554444_megahit_k177_608234_1|M
[sediment metagenome]
MATKSFEAKIVCKPDEKYTAEQKKQFLWFTHQVFNDGVRKVIPYVFKMKRGELGPEFQAIYYAITSSQDAIGKLEAVINPDWTS
GKIGKSDPNKWKELLKYQELEKGFRQRLKEEGIKSTKKFRKELEDEKKKLAKEIGQKDIWADAAAILRNKNLLLFNRDELLPNL
PSEFRRKIYEMTIQLIHGHQELVANWEDEHAEWLIEKDKWEEEHPEYMNVRPIFEKFEKEQGKVKGSRIRWLAYLDFLSSKPEL
ANWRGKAKETIPLTKEERAGFRKPGQHFAAFFNKNPELQELDRLHKEYQEKFARTQSKRTPHPDGFKHRPTFTLPDAMRHPVWY
SFKGATDPTKGSTYRNLDLENCTLDLKVLTAMEGEGRNPGGMIQYAFEPDERIKGFRYVGTTEKGKRAKGYIYYDPILEKERPA
KIQGIKLVFRPPRPDGTAYLIFSCQIEDEKPKIKIWKDKEEESPGEITKRKKTEVYPPELITLAIDFGQRHLGAITICKNNNGR
PEPIRFIPAYPKRRKDRESKPVSAWLAKIPGLTFNAVGMHEKEISAGMSRRFQDPKSIRQAGEKEGRKSKGQHIPETETPWAHL
REHIANMKEDHYKKAANLIIRTALQNGAQVILIENLRNYRPMLERTNLENRRRMQWAVRQTAKFLEDTARPLGLIVRQVSSAYT
SRFCSSCGHPGARVSLPGQKNWEKFYAEKYGKERKMIAVAGGQFFCCPACKKIINADINASLNMHKVFYQNFIWPEKIDKKDTK
NFIWQGKNYNWDQIADDVQSFLDQKAGIKKEDDIPY (SEQ ID NO: 350)
>SRR4030068_megahit_k177_2163203_10|M
[soil metagenome]
MGVRAIKSKIICDKVVLTHLWRTHKVFNERLPLIISLLFKMRRGEAGETPERQDLYRRIAEFILMRSSKDAPYLFNSICIRNWK
PNSAKGYKVRLIDDGGVATETSGESWAEEAARLSAEGHLLYDKDDMVGDLPALLQQMVFRDSVSIISGHDGLVDLWKKDHAEWL
KRKADWEGREENKKYITMRPKFEEFEAAVGGKIGKRRGRWHLYHEWLRENPDLAGWRGGPPVVNPISTAGKKRIARAAPSKKMS
VEFEEFWKANPELQALDRLHGYYEREFVRRRKRKRNPDGFDHRPTFTLPHPVRHPRWLVFNAPQTNPVGYRNLILPTARSLRGS
VELQLVTGEKTEERYPHAWVPVGFKADPRLGDLRRVTAKSVYRKGKDKGKEKEVEAYEFLDRHLNRYRKAALSGAKLIFRLSPG
GSPKEAYLYFTLEVANEPLTDKAKAIKWTETGEVTKRGKARKRKTVSEGLVTCAVDLGIRNLGFATLAEYVDGVPRILRSRNLW
IGIEEEGGARPGRWSEGPTLHHISEHKAKIRSLRRLRGKPVKGEESHLELQSHITSMGEDRFKRSARAIINFALNAKKEAGKKG
AYPRADVLLLERLEGMIPDAERGRGINRALMAWNRGQLVEQVKEVARDAGLKVFEIHPIGTSQVCSKCGSLGRRYSIGRNKEDG
EKEITFGWVEKLFACPCGYTANADHNASVNLHRRFLFDDGAIPGFLEWSKRDKSGREAMVARIEAALEPRLRAMHGLEPISV
(SEQ ID NO: 351)
>SRR5487326_megahit_k177_254484_5|M
[soil metagenome]
MAVRAIQARLESDKNMLEHLWRTHKVFNERLPRIISILFKMRRGEYGTTDEDRALYKSIAKFVLGRNARDAPYLLNSISIKNWT
PSTAKKMKVTITTSDGSEQEVYGDTWANKAAELSSAGRLLYDKEEVLGDLPDSLRQIVVRECVAIISGHDELVKNWDKAHTEWL
KKKEEWEAKEEHKKYLAVRSHFDDFEKSVGGKAGKRRARWHKYLQWLRENPDLAGWRGGLAAVNELSKEAQERVRKAKPWRQRS
VEAEEFWKANPELQALDRLHGQYERDFVRRRKTKRNPDGFEHRPTFTLPHFLRHPRWLVFNAPQTSPAGYRNLKLPGKVGQYGE
VDLRLLTDEIRGAEFPVDWTRLRFLGDPRLADFKPVKIQKAATKGKVKGELRERPAYRFFDGELQMERPAQISGAKLIFKNVRL
DDGSLQSATPYLYFTCEAESLQWTENARKVKWNATGEVMKKGKKRGYRTLPDGLIACAVDLGIRNLGFATLARYENGVPRLLRS
RNLWIGHAEARGIHPGRWSEGPELAHLALHKRELRRLRSLRGDPIAGEESHIKLQQHITYFAEDRFKKAARAIVNFALNVKEFA
DKNTGEIYPRADVLVLENLGTLLPNAEREKGINRSLIEFNRGHLVDRVKELAKDVGLRVFEVSPVGTSQVCSRCGTLGRRYSIR
RSAETHRPEIQFGFVEKLFACPECGYRANADHNASVNLHRRLAQVPGAFAQWEELGKDQQSKRKRWEEIEAKLLPSLQKMHGLD
GAGKPHPFLSA (SEQ ID NO: 352)
>SRR5487761_megahit_k177_404752_1|M
[soil metagenome]
MAVRAIQARLESDKNMLEHLWRTHKVFNERLPRIISILFKMRRGEYGTTDEDRALYKSIAKFVLGRNARDAPYLLNSISIKNWT
PSTAKKMKVTITTSDGSEQEVYGDTWANKAAELSSAGRLLYDKEEVLGDLPDSLRQIVVRECVAIISGHDELVKNWDKAHTEWL
KKKEEWEAKEEHKKYLAVRSHFDDFEKSVGGKAGKRRARWHKYLQWLRENPDLAGWRGGLAAVNELSKEAQERVRKAKPWRQRS
VEAEEFWKANPELQALDRLHGQYERDFVRRRKTKRNPDGFEHRPTFTLPHFLRHPRWLVFNAPQTSPAGYRNLKLPGKVGQYGE
VDLRLLTDEIRGAEFPVDWTRLRFLGDPRLADFKPVKIQKAATKGKVKGELRERPAYRFFDGELQMERPAQISGAKLIFKNVRL
DDGSLQSATPYLYFTCEAESLQWTENARKVKWNATGEVMKKGKKRGYRTLPDGLIACAVDLGIRNLGFATLARYENGVPRLLRS
RNLWIGHAEARGIHPGRWSEGPELAHLALHKRELRRLRSLRGDPIAGEESHIKLQQHITYFAEDRFKKAARAIVNFALNVKEFA
DKNTGEIYPRADVLVLENLGTLLPNAEREKGINRSLIEFNRGHLVDRVKELAKDVGLRVFEVSPVGTSQVCSRCGTLGRRYSIR
RSAETHRPEIQFGFVEKLFACPECGYRANADHNASVNLHRRLAQVPGAFAQWEELGKDQQSKRKRWEEIEAKLLPSLQKMHGFD
GAGKPHPFLSA (SEQ ID NO: 353)
>SRR8554485_megahit_k177_439309_3|P
[soil metagenome]
MAVRAIQVRLESDKTLLEHLWRTHKVFNERLPMIISILFKMRRGECGTTDEERTLYKNIARFVLARSSKDAPYLLNSISIKDWT
PSTARKMKATITIPDGSEQEVCGDTWADKVAELSAAGRLLYSKQEVLGDLPDSLRQMIVRECVAIISGHDELVRNWDKSHTEWL
KKREEWEAKEEHKKYLAVRSRFDEFEKSVGGKAGKRRARWHKYLQWLRESPDLAGWRGSLAVVNELSREAQERVRKAKPWRQRG
VEAEEFWKANPELQALDRLHGQYERDFVRRGKTKRNPDGFEHRPTFTLPHFLRHPRWLVFNAPQTSPPGYRNLKLPGKAGQYGE
VELRLLTNEIRGAEFPIDWTTLRFLGDPRLADFKPVKIQKAATKGKVKGELRGRPAYRFFDRELQMERPAQISGAKLIFKNVRL
DDGPLQSATPYLYFACEAKSLRWTENARKVKWNATGEVTKKGKKRGYRTLPDGLIACAVDLGIRNLGFATLARYENGVPRLLRS
RNLWIGHAETRGRHPGRWCEGPELAHLALHKRELRRLRSLRGDPIAGEESHIELQQHITHFAEDRFKKAARAIVNFALNVKEFA
DKNTGEIYPRADVLVLENLGSLLPDAEREKGINRSLIEFNRGHLVDRVKEVAKDVGLRVFEVSPVGTSQVCSRCGTLGRRYSIR
RSAETHRPEIQFGFVEKLFACPECGYRANADHNASVNLHRRLAQVPGAFAQWEELGKDQQRKRKRWEEIEAKLLPSLQKMHGFD
GAGKPHPFLSA (SEQ ID NO: 354)
>SRR8554511_megahit_k177_4512460_1|M
[soil metagenome]
MCESPQQRAFLELTHRLFNESLRPLVPLLYAARKGRHGPDYQQILSTIKSGQGASAQVEAVSSLAARPGSRGGKEWTDLAKELV
ARGQILFDRHALMPNVHKEFRRKVFEMAFQIILSHDAKMKQWRTDHAKWLREKAEWERSYPEYLAVRPVIQEFEAREGQAGKRR
GRWHRWLDFLVLYPQLAAWRGGEPTVRQLTQQELQEARRSRRRAVPNTIDAFFAKNPELKELHGLHGEYQARFVRPWAKRRHQD
GFFLPPTFTLPSADRHPAWYSFKRGDTYRNLSLEQRTIELRVLKSADPNESGRHAYVQYQFVGDNRLGKLSPASKIVRSGRFPC
DLLVWDEGSDHARPARVQGAKLVIRKGQAYLYFSVYIEDAPSRLPVKQAQIDKYSPGWSINRIRGEPYDPPLRTMAIDLGIRHI
AAATVMENGNVLATRFLHSRPVSRVSGHVIEGIPTLPQISEMKQRLRRARRKFGKPLKGTMSCRRIQRHVTSMSEDRCKKSASA
IVDFGRAHRVDIILMERLEGLVPDAARERRINCGLINWNRGHLASWIRIIAEPYGIRVLELPPRWTSQVCSHCGSIGARFTCTR
GEMKISAGGKLFGCPTCAFEANADFNASLNLQRVFWGLFPQVSKAGRGRVQCNDRVIELASVNQAWENHWLRKHNSANDVF
(SEQ ID NO: 355)
>SRR8554511_megahit_k177_1767604_11|P
[soil metagenome]
MAAKSYQPKMSTKSYPSKVICGKSEFDDLRRTHRVFNAGVRKLVDTYIAMKKGAYGQTAVEIAMYLLGKKGSKGHDLMNPLTAE
DAKDTLDTEGMKLVRQYRRESGILFSRYEKIYEIDGKAVCAGSAKKGDSKGKLVISSIFWHFICNQAIEYLRSNNELMQAWRDD
RRKWLEEKQKFFDENAGFREFVQGYLADFDAHAEKMRQEFQTQAGQRAYLRKRNKSDSGKRFSRWHLWYEWICSHPEILEWRGR
AKAADFVLLTPDEVHEVEKQFPKRQDRRTGKMLDMLRRKNPELDEIEKLRKTYTNDFARFRRPPTLTLPSADKHPCWCRLEKDK
LYRKADFEKGTIELCVVCKDETDGEYDMKWRTFRLKPDPRLQPSHRAKAFAAEGRYPPYKEGKVGNTLNRPAESPDKRLAGLKG
AKLILKRNDNAQIVFTVVEQNEPLKAKFSKKEGAKSSADRLEILDGKEATRVMAVDLGARHVGAYVITEGKRSSDVWRLEHLKK
AFVDSPDLPDLRSITQHDWQLRKARRKRGKPVKNQRSFISLQDHRTKMSDDRFKKAANVIVENARRHSVHIIVFEDLRDLKPTA
YNERWLNRQVRGMNHRHIFDFTKKMAAEFGINVTDVRAYNTSRLCSKCGFPGYRFSMKQKSPYREKAPRKGCSDFGYPVWDSGG
HLFRCPHCGYRVQADLNAAANIAQRFFGSLMEWKCKDYRYSNAMHPSFDARKDFDKWASDVQRRKSMPDAPF (SEQ ID NO:
356)
>SRR8554643_4328113_1|P
[soil metagenome]
MCESPQQRAFLELTHRLFNESLRPLVPLLYAARKGRHGPDYQQILSTIKSGQGASAQVEAVSSLAARPGSRGGKEWTDLAKELV
ARGQILFDRHALMPNVHKEFRRKVFEMAFQIILSHDAKMKQWRTDHAKWLREKAEWERSYPEYLAVRPVIQEFEAREGQAGKRR
GRWHRWLDFLVLYPQLAAWRGGEPTVRQLTQQELQEARRSRRRAVPNTIDAFFAKNPELKELHGLHGEYQARFVRPWAKRRHQD
GFFLPPTFTLPSADRHPAWYSFKRGDTYRNLSLEQRTIELRVLKSADPNESGRHAYVQYQFVGDNRLGKLSPASKIVRSGRFPC
DLLVWDEGSDHARPARVQGAKLVIRKGQAYLYFSVYIEDAPSRLPVKQAQIDKYSPGWSINRIRGEPYDPPLRTMAIDLGIRHI
AAATVMENGNVLATRFLHSRPVSRVSGHVIEGIPTLPQISEMKQRLRRARRKFGKPLKGTMSCRRIQRHVTSMSEDRCKKSASA
IVDFGRAHRVDIILMERLEGLVPDAARERRINCGLINWNRGHLASWIRIIAEPYGIRVLELPPRWTSQVCSHCGSIGARFTCTR
GEMKISAGGKLFGCPTCAFEANADFNASLNLQRVFWGLFPQVSKAGRGRVQCNDRVIELASVNQAWENHWLRKHNSANDVF
(SEQ ID NO: 355)
>SRR8554643_megahit_k177_1281129_3|P
[soil metagenome]
MATKTYYARFVNTTPRLRAALERSHYVYVECLRQMIERYIAMRKGKLGEECRQLAKIILTTGNTEARGIMNQITRPVVTSGKDY
EWVKLAKQVHKLRGPLLLQDEGFARVDGVTIRTKHHGKVEPTRGELAVTAKFWMQICDMASSFLKSNAELMDDWREERTKWLRE
KAEWEERNSDFLKFWNGPYTEFENLYERMRLEAQTAAGQTPTVRKRQSRERGKRIDRWHLWYEWVISHPEIMAWRNQARASDFK
VMPIELQNQIKRKHPRQNKYIPEFLKWLRENNAEFDRLDSLRRVYVNNYCRFKRPPTLTLPSPKKHPYWFTFERDEFYKDADFE
TGAIRLLLIDQKDDGAWFFEWFDAQMKCDPRLKPSVRAEHFNKEGRYPPYIDGKPARKLNRSAASPEQRRAGYTGAKLVLKGAR
QELLFTVIEQDCPPKVKWQKVKMRACRADNAFSAEGERIPLKIMAIDLGIRHTAAYVIAEGTLQDGQWHLSWQKKGIVRDIHIS
PLMNIRQHDWELREGRSRQGKAAKGERTFVDLQDHRTDMADDRFKKAANTIVETAREHDVRLILFEQLKNWFPKAFDERWMNRQ
LRDMNRRKIVEMVEGQSKEFGIICADNISPWLTSRICSRCYKPGWRFSIKGKDPYKEKLSRRHCQDFGYPIWDRGGGHLFRCSH
CGYRANADINAAGNVAAKFFGAWPVLSCKKGVYTWQQDGQKHTFDARETFESWAQDVRRRKQIAESPF (SEQ ID NO:
357)
>SRR8554643_megahit_k177_1281129_3|M
[soil metagenome]
MIERYIAMRKGKLGEECRQLAKIILTTGNTEARGIMNQITRPVVTSGKDYEWVKLAKQVHKLRGPLLLQDEGFARVDGVTIRTK
HHGKVEPTRGELAVTAKFWMQICDMASSFLKSNAELMDDWREERTKWLREKAEWEERNSDFLKFWNGPYTEFENLYERMRLEAQ
TAAGQTPTVRKRQSRERGKRIDRWHLWYEWVISHPEIMAWRNQARASDFKVMPIELQNQIKRKHPRQNKYIPEFLKWLRENNAE
FDRLDSLRRVYVNNYCRFKRPPTLTLPSPKKHPYWFTFERDEFYKDADFETGAIRLLLIDQKDDGAWFFEWFDAQMKCDPRLKP
SVRAEHFNKEGRYPPYIDGKPARKLNRSAASPEQRRAGYTGAKLVLKGARQELLFTVIEQDCPPKVKWQKVKMRACRADNAFSA
EGERIPLKIMAIDLGIRHTAAYVIAEGTLQDGQWHLSWQKKGIVRDIHISPLMNIRQHDWELREGRSRQGKAAKGERTFVDLQD
HRTDMADDRFKKAANTIVETAREHDVRLILFEQLKNWFPKAFDERWMNRQLRDMNRRKIVEMVEGQSKEFGIICADNISPWLTS
RICSRCYKPGWRFSIKGKDPYKEKLSRRHCQDFGYPIWDRGGGHLFRCSHCGYRANADINAAGNVAAKFFGAWPVLSCKKGVYT
WQQDGQKHTFDARETFESWAQDVRRRKQIAESPF (SEQ ID NO: 358)
>SRR6056591_megahit_k177_2733919_1|P
[subsurface metagenome]
MATKSYRSRIVCTKAELDDLVRTHRVFNAGVRAMVDLYISMKKGTYGETAKEIARYLLDHSGTKGHDLMNPLTDRGGKDTRDDE
GMKLVRRHRQEHGILFPRHERICEIDGRKVRAGSSAKKEKSRDTLTISSIFWHFICNQAIEYLRSNNELMAAWREERGKWLRDK
EKFFAENPGFREFVEGYLAAFDAHAEKARQEFQTKAGQRAHARKRKKSGSGKRFSRWHLWCEWICDHPEIIEWRGKAKGEGFAF
LTAEEVRAIEEEFPKREDRRAGRMLDMLTRKNPELAEVEKLRKKYNNDYARFRRPPTLTLPSAKKHPCWYRLEKGKLYRNEDFE
KGTIEILVICHDEKEDAYYMDWRPFSIKPEPRLVPSHRARAFAAEGRYPPYKEGKVGNTLNRPAESAEERLAGLKGAKLILKPK
GNAQLVFTVVEQNEPLKAKFRKKAGATSSADRLDILDGNKATRVMGIDLGARHVGAYVITEGKKKGDGWKLAPLRKGFIDSPDL
PRLRSITRHENQLKKGRRKRGKPVKNERSFISLQGHRTKMSTDRFKKAANLIVEKAREHDVHIIVFEDLRRLKPTAYDERWLNR
QVRSMNHRHIFDLAKEMAPEFGIQVTDINPYNTSRLCSKCGFPGYRFSMKRKNPYREQAPRRECADFGYPVWDSGGHLFRCPHC
GYRVQADLNAAGNIARKFFGHFMDWECKEYTYRNAVQPSFDARKDFDQWASGVLKRRTMPDAPF (SEQ ID NO: 324)
>SRR6263259_megahit_k177_232832_6|M
[terrestrial metagenome]
MAVKTLQSRLHCKPKKLEALWRTHEIFNERLKDVLSLLFRMRRGECGRSPDERELYREIALFITACPANNAPYLLNSVCIQNWV
PTTARKIKAIVSRSSGELIKGTEESWTTRAAQLSAKGHLLFDKREVLGDLTPAMAQVIVREAAAYLSNYESHVRRWEREHEQWL
GEKAAWEAEPEHQLYLASRPRFTAFEAGIGGRLTERRHRWAQYLTWLSQNPELAAWRGGLATINPIGEEGRKRIAHAPRWRKAQ
VEAEEFFKLNPELKDLDALHGYYERKFVRRRKTKRHIDGFDHKPTFTQPDALVHPHWYLFNGPQTKPAGYRKLILPKSSKQAGS
IELSLMTCDKNDPNDTAWVPFRFHGDCRMSNFRSVVVTSKIKSGGKRGQTKEKEGYEMYDPALKTWRPAEIKGARLIFTVKGKR
PRAAYLYFTIKTKNTPFSEAARNIEWSETGETSVFGPPRKTKLVPEGLVTCAAHIGARDCVYATLAVGDGSTPHIIRQRNLWIE
HIEATGQHVGRRHRGPSLAHLASHKMELSRRRSQMGRIPRGETAHEGLQSHITNMAKDRYRQQARRIFDFALNVEGVGDPRAGK
SYPRADVLILESMENLIPNVERERGVNKALVAFNRAHLVSHLKEIVAEAGVMVFEISPVGTSQVCSRCGALGRPYSVRRRSKDH
PVAITFGPAEPLFACPSCHYRANSSHNASVNLHHRFYSDQALESFITYLRQPVERKLENLRRIEAELISPIAGPLSLYEMHGIK
IG (SEQ ID NO: 359)
>3300031539|Ga0307380_10018846_3|P
[terrestrial-soil]
MATKTYYARFVNTTPRLRAALERSHYVYVECLRQMIERYIAMRKGKLGEECRQLAKIILTTGNTEARGIMNQITRPVVTSGKDY
EWVKLAKQVHKLRGPLLLQDEGFARVDGVTIRTKHHGKVEPTRGELAVTAKFWMQICDMASSFLKSNAELMDDWREERTKWLRE
KAEWEERNSDFLKFWNGPYTEFENLYERMRLEAQTAAGQTPTVRKRQSRERGKRIDRWHLWYEWVISHPEIMAWRNQARASDFK
VMPIELQNQIKRKHPRQNKYIPEFLKWLRENNAEFDRLDSLRRVYVNNYCRFKRPPTLTLPSPKKHPYWFTFERDEFYKDADFE
TGAIRLLLIDQKDDGAWFFEWFDAQMKCDPRLKPSVRAEHFNKEGRYPPYIDGKPARKLNRSAASPEQRRAGYTGAKLVLKGAR
QELLFTVIEQDCPPKVKWQKVKMRACRADNAFSAEGERIPLKIMAIDLGIRHTAAYVIAEGTLQDGQWHLSWQKKGIVRDIHIS
PLMNIRQHDWELREGRSRQGKAAKGERTFVDLQDHRTDMADDRFKKAANTIVETAREHDVRLILFEQLKNWFPKAFDERWMNRQ
LRDMNRRKIVEMVEGQSKEFGIICADNISPWLTSRICSRCYKPGWRFSIKGKDPYKEKLSRRHCQDFGYPIWDRGGGHLFRCSH
CGYRANADINAAGNVAAKFFGAWPVLSCKKGVYTWQQDGQKHTFDARETFESWAQDVRRRKQIAESPF (SEQ ID NO:
357)
>3300031539|Ga0307380_10018846_4|M
[terrestrial-soil]
MIERYIAMRKGKLGEECRQLAKIILTTGNTEARGIMNQITRPVVTSGKDYEWVKLAKQVHKLRGPLLLQDEGFARVDGVTIRTK
HHGKVEPTRGELAVTAKFWMQICDMASSFLKSNAELMDDWREERTKWLREKAEWEERNSDFLKFWNGPYTEFENLYERMRLEAQ
TAAGQTPTVRKRQSRERGKRIDRWHLWYEWVISHPEIMAWRNQARASDFKVMPIELQNQIKRKHPRQNKYIPEFLKWLRENNAE
FDRLDSLRRVYVNNYCRFKRPPTLTLPSPKKHPYWFTFERDEFYKDADFETGAIRLLLIDQKDDGAWFFEWFDAQMKCDPRLKP
SVRAEHFNKEGRYPPYIDGKPARKLNRSAASPEQRRAGYTGAKLVLKGARQELLFTVIEQDCPPKVKWQKVKMRACRADNAFSA
EGERIPLKIMAIDLGIRHTAAYVIAEGTLQDGQWHLSWQKKGIVRDIHISPLMNIRQHDWELREGRSRQGKAAKGERTFVDLQD
HRTDMADDRFKKAANTIVETAREHDVRLILFEQLKNWFPKAFDERWMNRQLRDMNRRKIVEMVEGQSKEFGIICADNISPWLTS
RICSRCYKPGWRFSIKGKDPYKEKLSRRHCQDFGYPIWDRGGGHLFRCSHCGYRANADINAAGNVAAKFFGAWPVLSCKKGVYT
WQQDGQKHTFDARETFESWAQDVRRRKQIAESPF (SEQ ID NO: 358)
>3300031539|Ga0307380_10072822_2|M
[terrestrial-soil]
MCESPQQRAFLELTHRLFNESLRPLVPLLYAARKGRHGPDYQQILSTIKSGQGASAQVEAVSSLAARPGSRGGKEWTDLAKELV
ARGQILFDRHALMPNVHKEFRRKVFEMAFQIILSHDAKMKQWRTDHAKWLREKAEWERSYPEYLAVRPVIQEFEAREGQAGKRR
GRWHRWLDFLVLYPQLAAWRGGEPTVRQLTQQELQEARRSRRRAVPNTIDAFFAKNPELKELHGLHGEYQARFVRPWAKRRHQD
GFFLPPTFTLPSADRHPAWYSFKRGDTYRNLSLEQRTIELRVLKSADPNESGRHAYVQYQFVGDNRLGKLSPASKIVRSGRFPC
DLLVWDEGSDHARPARVQGAKLVIRKGQAYLYFSVYIEDAPSRLPVKQAQIDKYSPGWSINRIRGEPYDPPLRTMAIDLGIRHI
AAATVMENGNVLATRFLHSRPVSRVSGHVIEGIPTLPQISEMKQRLRRARRKFGKPLKGTMSCRRIQRHVTSMSEDRCKKSASA
IVDFGRAHRVDIILMERLEGLVPDAARERRINCGLINWNRGHLASWIRIIAEPYGIRVLELPPRWTSQVCSHCGSIGARFTCTR
GEMKISAGGKLFGCPTCAFEANADFNASLNLQRVFWGLFPQVSKAGRGRVQCNDRVIELASVNQAWENHWLRKHNSANDVF
(SEQ ID NO: 355)
>3300031539|Ga0307380_10072822_2|P
[terrestrial-soil]
MIQGTTSCASPTIAVKCFQAKLVCESPQQRAFLELTHRLFNESLRPLVPLLYAARKGRHGPDYQQILSTIKSGQGASAQVEAVS
SLAARPGSRGGKEWTDLAKELVARGQILFDRHALMPNVHKEFRRKVFEMAFQIILSHDAKMKQWRTDHAKWLREKAEWERSYPE
YLAVRPVIQEFEAREGQAGKRRGRWHRWLDFLVLYPQLAAWRGGEPTVRQLTQQELQEARRSRRRAVPNTIDAFFAKNPELKEL
HGLHGEYQARFVRPWAKRRHQDGFFLPPTFTLPSADRHPAWYSFKRGDTYRNLSLEQRTIELRVLKSADPNESGRHAYVQYQFV
GDNRLGKLSPASKIVRSGRFPCDLLVWDEGSDHARPARVQGAKLVIRKGQAYLYFSVYIEDAPSRLPVKQAQIDKYSPGWSINR
IRGEPYDPPLRTMAIDLGIRHIAAATVMENGNVLATRFLHSRPVSRVSGHVIEGIPTLPQISEMKQRLRRARRKFGKPLKGTMS
CRRIQRHVTSMSEDRCKKSASAIVDFGRAHRVDIILMERLEGLVPDAARERRINCGLINWNRGHLASWIRIIAEPYGIRVLELP
PRWTSQVCSHCGSIGARFTCTRGEMKISAGGKLFGCPTCAFEANADFNASLNLQRVFWGLFPQVSKAGRGRVQCNDRVIELASV
NQAWENHWLRKHNSANDVF (SEQ ID NO: 360)
>3300031566|Ga0307378_10072489_1|M
[terrestrial-soil]
MCESPQQRAFLELTHRLFNESLRPLVPLLYAARKGRHGPDYQQILSTIKSGQGASAQVEAVSSLAARPGSRGGKEWTDLAKELV
ARGQILFDRHALMPNVHKEFRRKVFEMAFQIILSHDAKMKQWRTDHAKWLREKAEWERSYPEYLAVRPVIQEFEAREGQAGKRR
GRWHRWLDFLVLYPQLAAWRGGEPTVRQLTQQELQEARRSRRRAVPNTIDAFFAKNPELKELHGLHGEYQARFVRPWAKRRHQD
GFFLPPTFTLPSADRHPAWYSFKRGDTYRNLSLEQRTIELRVLKSADPNESGRHAYVQYQFVGDNRLGKLSPASKIVRSGRFPC
DLLVWDEGSDHARPARVQGAKLVIRKGQAYLYFSVYIEDAPSRLPVKQAQIDKYSPGWSINRIRGEPYDPPLRTMAIDLGIRHI
AAATVMENGNVLATRFLHSRPVSRVSGHVIEGIPTLPQISEMKQRLRRARRKFGKPLKGTMSCRRIQRHVTSMSEDRCKKSASA
IVDFGRAHRVDIILMERLEGLVPDAARERRINCGLINWNRGHLASWIRIIAEPYGIRVLELPPRWTSQVCSHCGSIGARFTCTR
GEMKISAGGKLFGCPTCAFEANADFNASLNLQRVFWGLFPQVSKAGRGRVQCNDRVIELASVNQAWENHWLRKHNSANDVF
(SEQ ID NO: 355)
>3300031566|Ga0307378_10072489_1|M
[terrestrial-soil]
MIQGTTSCASPTIAVKCFQAKLVCESPQQRAFLELTHRLFNESLRPLVPLLYAARKGRHGPDYQQILSTIKSGQGASAQVEAVS
SLAARPGSRGGKEWTDLAKELVARGQILFDRHALMPNVHKEFRRKVFEMAFQIILSHDAKMKQWRTDHAKWLREKAEWERSYPE
YLAVRPVIQEFEAREGQAGKRRGRWHRWLDFLVLYPQLAAWRGGEPTVRQLTQQELQEARRSRRRAVPNTIDAFFAKNPELKEL
HGLHGEYQARFVRPWAKRRHQDGFFLPPTFTLPSADRHPAWYSFKRGDTYRNLSLEQRTIELRVLKSADPNESGRHAYVQYQFV
GDNRLGKLSPASKIVRSGRFPCDLLVWDEGSDHARPARVQGAKLVIRKGQAYLYFSVYIEDAPSRLPVKQAQIDKYSPGWSINR
IRGEPYDPPLRTMAIDLGIRHIAAATVMENGNVLATRFLHSRPVSRVSGHVIEGIPTLPQISEMKQRLRRARRKFGKPLKGTMS
CRRIQRHVTSMSEDRCKKSASAIVDFGRAHRVDIILMERLEGLVPDAARERRINCGLINWNRGHLASWIRIIAEPYGIRVLELP
PRWTSQVCSHCGSIGARFTCTRGEMKISAGGKLFGCPTCAFEANADFNASLNLQRVFWGLFPQVSKAGRGRVQCNDRVIELASV
NQAWENHWLRKHNSANDVF (SEQ ID NO: 360)
>3300031539|Ga0307380_10070813_2|P
[terrestrial-soil]
MAVRAIQVRLESDKTLLEHLWRTHKVFNERLPMIISILFKMRRGECGTTDEERTLYKNIARFVLARSSKDAPYLLNSISIKDWT
PSTARKMKATITIPDGSEQEVCGDTWADKVAELSAAGRLLYSKQEVLGDLPDSLRQMIVRECVAIISGHDELVRNWDKSHTEWL
KKREEWEAKEEHKKYLAVRSRFDEFEKSVGGKAGKRRARWHKYLQWLRESPDLAGWRGSLAVVNELSREAQERVRKAKPWRQRG
VEAEEFWKANPELQALDRLHGQYERDFVRRGKTKRNPDGFEHRPTFTLPHFLRHPRWLVFNAPQTSPPGYRNLKLPGKAGQYGE
VELRLLTNEIRGAEFPIDWTTLRFLGDPRLADFKPVKIQKAATKGKVKGELRGRPAYRFFDRELQMERPAQISGAKLIFKNVRL
DDGPLQSATPYLYFACEAKSLRWTENARKVKWNATGEVTKKGKKRGYRTLPDGLIACAVDLGIRNLGFATLARYENGVPRLLRS
RNLWIGHAETRGRHPGRWCEGPELAHLALHKRELRRLRSLRGDPIAGEESHIELQQHITHFAEDRFKKAARAIVNFALNVKEFA
DKNTGEIYPRADVLVLENLGSLLPDAEREKGINRSLIEFNRGHLVDRVKEVAKDVGLRVFEVSPVGTSQVCSRCGTLGRRYSIR
RSAETHRPEIQFGFVEKLFACPECGYRANADHNASVNLHRRLAQVPGAFAQWEELGKDQQRKRKRWEEIEAKLLPSLQKMHGFD
GAGKPHPFLSA (SEQ ID NO: 354)
>3300031965|Ga0326597_10006968_2|P
[terrestrial-soil]
MGVKAWKVKLFVDAPEKQAVLDDTLQQWNLYAAHVCKVLLAFRRNDYGDVGLEVWRQLAKTPQNYHVLYCITPRSDAAPDQGPR
VTREKDYHRAARAFVQRHGYEPELAAVRRDAGPLWKQIVKAARERVLSYEQKVADWREAREQWIVQRREWEGDNPPYMAVRPVI
EAFQRDHGATRGRRVRWRKWQAFLQSTPELAAWRGGAACVEPLSAQELRHAARNRRKAARRERELFLDKNPELAELDRVHFQYE
RLFARTAAKRRNPDGFRHRPTFTLPSLPNRPDWPRFQAMEGYKNLDITSRSVQLRLPTSDTRHWLSLSFVPDPRLARLVPLERS
VKEGRTRFDYRFPNRPGEFVLAQPQEIRLIRRGSSYFATIRLTLQPTPSPLPLTQTAAGKYSPQWVIRKIRDDAPDLSLVTCAV
DLAVRHLGAASVAREGRVFARRILHNRFFRPNDLRERALNIPSLPEIAAVRRRIRRAQRRSGRMSPAKDTCRRLWTHYRNLCED
HYKKAVAAIFAYALHHGAHLVIFEDLKMLNPDSANERGVNNALQNWNRGNIVRFAKMAAEDHGLRVVTVGAWWTSRLCARCGGM
GVRFNQGKRRPWGQRRHTAPRPVPIDRLTCNIAPLGHWFLCPGCRSCLHADINASENLHRQFLGSLPTVKRLGSSRPPIYEVNG
QRVEQARLEAAANELLLARTAPATPF (SEQ ID NO: 361)
>3300017540|Ga180217_1000254_36|M
[terrestrial-soil-compost]
MGTKAWKAKLILDSEDARAALLHTFSVWNAACAEVCEALLAFRRGEFGEEGRRVWTYLRDAGTQGYYILWCITKAPRPREVKEL
HRIAADFVARHGFHQGLLAVRERLPSALWKQVIHAARERVASYEEKVAIWNEDHAQWLADRAEWEAEHASYMAVRPLIEQFQSQ
FGATRGRRARWHAWLTFLGSTPALQSWRGGPPGVVSLTSGERQAARRNPRKAVAREAELFYAKNPELAELNRIHGEYERRFARS
WAKRKNPDGFRHRPTFTLPNEKSHPDWPRLQANEGWKALDPAARTIRLQLIAPDGTARLYPFRFVPDPRLSRLTPLAEPLKEGR
ITYAYSVPGPQGRPTPAQPQGIKVILRGDSAFISISLSLLPPPSAIPVTQAAMTKYPPTWALKQIREKAPELELVTCAVDLGVR
HIGAATIAREGEVIARRILHHRFFPPGGDPARPINIPSLAEIAEVKRQLRRARRRSGKPAPGKESCRRLQAHYRGLCEDRYKKV
VAAIFEFAAAHGAHIVIFEDLRMLNPDSANERGVNAALMNWNRGSIVRFARATAEDRGLRVATVGAWWTSRICCRCDALGVRFE
QGRRREWARAPVASPAPPDRTACTISRLGQWFFCPACRRRVHADINASENLHRVFLGTFPKVERVGREPPAYEVGGQHVDFREI
QRAAAAILSAPATPF (SEQ ID NO: 362)
>3300014494|Ga0182017_10000840_9|P
[terrestrial-soil-fen]
MGVRALRARIECDRETLLHLWRTHCAFNQRLLSILTKLFGMRRGELGETAARRALYQRVARFLLARDSKDAPYLLNSVSIQGWK
PATALKMKVRMPAPDGTLAEVSADTWAPEAAKLSAHGTLAYDKEAVRDGLPDSLFQPMLRDAVAYISGHIELARNWEAEHADWL
KAKAEWEEKDERKKYLALRPRFDAFEQSVGGKAGKRRERWHLYLTWLRENPALAAWRGGPPAVHPLDAKATARVAKAKPWKKRS
VEADEFWKANPELRELDKLHGYYEREFVRRRKTKKNPDGFDHRPTFTLPHAVLHPRWTLFNAPQTSPQGYADLRLPQRPGTLGS
VKLRLLTGEKAPDGCPNEWVGVQFRADPRLSQFAERAEAQEIRKGKKKGTQKTVRVFRFVDQQLNCERPAQISGAKLIFKNVKL
NDDGSLKSATPYLVFACTIDNLPLTEHARAIQWSETGEVTKTGKKRKAKKLPTGLVTCAVDLGLRNLAFLTLATSGEGPQNNTH
DGIRVLRSRNQWLALEETAGTHPGRWSAGPDLAHIAAHKREIRRLRRLRGKPVKGQQSHVELQGHIDHMGQDRFKKAARAIVNF
ALNVDRAAGQSGQPYPRADLLIVEKLEGFIPDAARERGINRALVAWNRGQLVTRIKEVAADAGLKLFPVHPAGTSQCCSRCGAL
GRRYSIVRDQQTGVPAIRFGWVEKLFACPNRECPGRAPDKPDQPFTCNADHNASLNLHRRFVLDDRAVAAFFAWKNKTNAERER
ELTQMDQALRPELEKLHRLPLAELATPF (SEQ ID NO: 343)
>3300014839|Ga0182027_10004505_2|P
[terrestrial-soil-fen]
MFNRRLPDLISLLFRMRRGECGETEQASRLYSQVASFILARGSKDAPYLLNSVSVRGWKPHTAKKMKARALGPDGQQIELAGED
WADPAAALSAEGRLLYDKTELLGDVPDTLRQMAARECVAIISGHEELVRAWEKAHEEWLASKAKWESDPENQFYLGLRARFDEF
EQSVGGKVGKRRGRWQRYLDWLRANPDLAAWRGGPAAVVELSAGAKERIRKAKPRKVRSVEAEEFWKVNSELAALDRLHGYYER
EFVRRRKTKKHPDGFDHRPTFTLPHPVRHPRWFVFNAPQTSPQGYRKLCLPSSGGHTGTVELLLLTGEKADNKYPSGWETVRFA
ADPRLSDFKAITKRRQVLKGKTKGQETDTKAFTFLDRQINLERPAQISGVKLIFKGVRQNHDGSLLSAHPYLVFTCNVADVPLT
DGAKKIKWEDTGERRKRVVVPAGLIACAVDLGIRHVGFATVATQDAESGGLHVLRSRNIWIGQEEEKGRNPGRWSPGPDLAHLS
AHKRSLRHLRGLRGKPVKGENSHIELQDHITNMASDRFKKAAREIVNFALNADSKVDPRTGEPYPRADVLVLENLANLLPDSER
ERGINRALIEFNRGHLADRIVEVAKDCGLKVMMVSPVGTSQVCCRCGALGRRYSLRRHQDGGYTDIHFGFVEPLFACPSCGYRA
NSDHNASVNLHRRFRLGEAAIAKFKEWQKGTKPERDEVLRRIEQSLVGPLREMHRLAVADTPF (SEQ ID NO: 346)
>3300031715|Ga0307476_10004505_2|P
[terrestrial-soil-fen]
MSTRALQSRIQCDHQTLEHLWRTHLVFNRRLPDLISLLFRMRRGECGETEQASRLYSQVASFILARGSKDAPYLLNSVSVRGWK
PHTAKKMKARALGPDGQQIELAGEDWADPAAALSAEGRLLYDKTELLGDVPDTLRQMAARECVAIISGHEELVRAWEKAHEEWL
ASKAKWESDPENQFYLGLRARFDEFEQSVGGKVGKRRGRWQRYLDWLRANPDLAAWRGGPAAVVELSAGAKERIRKAKPRKVRS
VEAEEFWKVNSELAALDRLHGYYEREFVRRRKTKKHPDGFDHRPTFTLPHPVRHPRWFVFNAPQTSPQGYRKLCLPSSGGHTGT
VELLLLTGEKADNKYPSGWETVRFAADPRLSDFKAITKRRQVLKGKTKGQETDTKAFTFLDRQINLERPAQISGVKLIFKGVRQ
NHDGSLLSAHPYLVFTCNVADVPLTDGAKKIKWEDTGERRKRVVVPAGLIACAVDLGIRHVGFATVATQDAESGGLHVLRSRNI
WIGQEEEKGRNPGRWSPGPDLAHLSAHKRSLRHLRGLRGKPVKGENSHIELQDHITNMASDRFKKAAREIVNFALNADSKVDPR
TGEPYPRADVLVLENLANLLPDSERERGINRALIEFNRGHLADRIVEVAKDCGLKVMMVSPVGTSQVCCRCGALGRRYSLRRHQ
DGGYTDIHFGFVEPLFACPSCGYRANSDHNASVNLHRRFRLGEAAIAKFKEWQKGTKPERDEVLRRIEQSLVGPLREMHRLAVA
DTPF (SEQ ID NO: 347)
>3300031715_Ga0307476_10010105_2|P
[terrestrial-soil-hardwood forest soil]
MSVRAIQARINCDRQTLLDLWRTHCVFNQRLPSILSVLFKMRRGECGDSPELQDLYQRISRFIIASSSQLADALLNSVSIRNWK
PDSARKRKIKVVSETGEIVEVTGETWADAAAAISKQGQLLYDKRALLFDLPNSMRQIVSREAVTIISGHDELTAIWHKEHAAWS
KQKAEWQNGAENQRYLALRPKFAAFEEEVGGAITKRRGRWHLYLQWLPERPELAAWRGGPAIVRKLDHAALLRVQRSRPSKQRT
VEAEEFWKINPELKVLDRLHGDYESRFVRRRKTKKNSDGFDHRPTFTLPHPVNHPRWFVFNAPQTSPQGYGDLKLPAEPNGFGT
ISLRLLTGEKSEGGYPSNWRTVRFKADPRLADFRQVSVKYRTNKGASKGTEREKRGYIFVDRQLKLERKATISGAKLVFRDIRL
NPDGSLSSATPYLIFTCNIDDELMTERAKAIKWSDTGEITKKGKPRKKKTLPSSLVSCAIDLGHRHLGFATIAQAEETGLRILR
SRNLWIGHKETTGHHPGRWCEGPDLAHLGQHKRKLRALRRLRGKPVKDERTHVELQGHIDDMAEDRFKKGARAIINFALNTDNR
IDEKTGKPIPRADVLLLENLENLIPDAERERGINRMLVQFNRGNLVKRVKEMAADAGLKVFEVSPFGTSQVCSKCGELGRRYSI
RRQQVPEDPTQTRPDIHFGLVEKLFACPKCNYRANADHNASVNLHRRFHNDGLALKSFAEFRALSDQDRLRSIEQIDAKLLEPL
RELHNVGPVTPF (SEQ ID NO: 363)
>3300031715|Ga0307476_10010105_1|M
[terrestrial-soil-hardwood forest soil]
MADALLNSVSIRNWKPDSARKRKIKVVSETGEIVEVTGETWADAAAAISKQGQLLYDKRALLFDLPNSMRQIVSREAVTIISGH
DELTAIWHKEHAAWSKQKAEWQNGAENQRYLALRPKFAAFEEEVGGAITKRRGRWHLYLQWLPERPELAAWRGGPAIVRKLDHA
ALLRVQRSRPSKQRTVEAEEFWKINPELKVLDRLHGDYESRFVRRRKTKKNSDGFDHRPTFTLPHPVNHPRWFVFNAPQTSPQG
YGDLKLPAEPNGFGTISLRLLTGEKSEGGYPSNWRTVRFKADPRLADFRQVSVKYRTNKGASKGTEREKRGYIFVDRQLKLERK
ATISGAKLVFRDIRLNPDGSLSSATPYLIFTCNIDDELMTERAKAIKWSDTGEITKKGKPRKKKTLPSSLVSCAIDLGHRHLGF
ATIAQAEETGLRILRSRNLWIGHKETTGHHPGRWCEGPDLAHLGQHKRKLRALRRLRGKPVKDERTHVELQGHIDDMAEDRFKK
GARAIINFALNTDNRIDEKTGKPIPRADVLLLENLENLIPDAERERGINRMLVQFNRGNLVKRVKEMAADAGLKVFEVSPFGTS
QVCSKCGELGRRYSIRRQQVPEDPTQTRPDIHFGLVEKLFACPKCNYRANADHNASVNLHRRFHNDGLALKSFAEFRALSDQDR
LRSIEQIDAKLLEPLRELHNVGPVTPF (SEQ ID NO: 364)

TABLE 13
Nucleotide sequences of Representative CLUST.089537 Direct Repeats

| Effector Protein Accession | Direct Repeat Nucleotide Sequence |
|---|---|
| CAAACX010000652_28\|M (SEQ ID NO: | CGTGCATCGGCCGACGAAGAGCGAAGGTCAGTGACAG (SEQ ID NO: |
| 301) | 401) |
| CAAACH010011569_2\|M (SEQ ID NO: | CGCCGCAGCGGCCGACGCGGCCCTGATCGATGGACAC (SEQ ID NO: |
| 302) | 402) |
| CAAACI010012331_3\|M (SEQ ID NO: 303) | GCCGCAGCGGCCGACGCGGCCCTGATCGATGGACAC (SEQ ID NO: 403) |
| UZXW01002767_11\|M (SEQ ID NO: 304) | GGAGCGCCCCCCGACGCGGCAATGATCGGCTGACAC (SEQ ID NO: 404) |
| 3300009161\|Ga0114966_10008307_8\|M | CTCTCAATGGCTAAAGATCTAGTTCTAATTGGACAC (SEQ ID NO: 405) |
| (SEQ ID NO: 305) | |
| 3300009161\|Ga0114966_10008307_7\|P | CTCTCAATGGCTAAAGATCTAGTTCTAATTGGACAC (SEQ ID NO: 405) |
| (SEQ ID NO: 306) | |
| 3300010885\|Ga0133913_10083255_2\|P | CTCTCAATGGCTAAAGATCTAGTTCTAATTGGACAC (SEQ ID NO: 405) |
| (SEQ ID NO: 306) | |
| 3300020109\|Ga0194112_10008260_1\|P | CCCCCCCCGCCATTCTCGGCTGTGTACAAC (SEQ ID NO: 406) |
| (SEQ ID NO: 307) | |
| 3300020109\|Ga0194112_10008260_1\|M | CCCCCCCCGCCATTCTCGGCTGTGTACAAC (SEQ ID NO: 406) |
| (SEQ ID NO: 308) | |
| 3300020222\|Ga0194125_10021011_3\|M | CGGGTGTACCCCCCCCGCCATTCTCGGCTGTGTACAAC (SEQ ID NO: |
| (SEQ ID NO: 309) | 407) |
| 3300027770\|Ga0209086_10006474_1\|P | TCTCTCAATGGCTAAAGATCTAGTTCTAATTGGACACC (SEQ ID NO: |
| (SEQ ID NO: 306) | 408) |
| 3300015360\|Ga0163144_10184575_1\|M | GCGGCGCTGGCCAGCGCCGCGCTGAA (SEQ ID NO: 409) |
| (SEQ ID NO: 310) | |
| 3300013130\|Ga0172363_10020541_1\|M | GTTGCACCTCGCGCGCACCTGCGGGTTGACAC (SEQ ID NO: 410) |
| (SEQ ID NO: 311) | |
| 3300013133\|Ga0172362_10044703_1\|M | GGCGCACCGCGTGGCGTGGAACTGACCGGCTGACAC (SEQ ID NO: 411) |
| (SEQ ID NO: 312) | |
| 3300031862\|Ga0315280_10005430_2\|M | CCTGTATCCGCGCGCGCGTTTGCGGCTGATGAACAC (SEQ ID NO: 412) |
| (SEQ ID NO: 313) | |
| 3300031952\|Ga0315294_10035890_2\|P | GTATTCATCCCCTTCAGAAAAGGAACTCTCTGGACAC (SEQ ID NO: |
| (SEQ ID NO: 314) | 413) |
| 3300031952\|Ga0315294_10041214_2\|M | GGCGCACCCGCTGGCGCGGAACAGACCGACTGACAC (SEQ ID NO: 414) |
| (SEQ ID NO: 315) | |
| 3300031952\|Ga0315294_10041214_2\|P | GGCGCACCCGCTGGCGCGGAACAGACCGACTGACAC (SEQ ID NO: 414) |
| (SEQ ID NO: 316) | |
| 3300031952\|Ga0315294_10058002_1\|M | CTCTCAACCGCTTGGGCAGAACCGACCGACTGACAC (SEQ ID NO: 415) |
| (SEQ ID NO: 317) | |
| 3300032046\|Ga0315289_10071835_2\|M | CTGTCCCCCCCGGACCTGACCAATAAGGGATTGACAC (SEQ ID NO: |
| (SEQ ID NO: 318) | 416) |
| 3300032053\|Ga0315284_10046226_2\|P | GTGACATCTTATGCGTGTGTACAGGTGGACAC (SEQ ID NO: 417) |
| (SEQ ID NO: 319) | |
| 3300032069\|Ga0315282_10002412_8\|P | CCTGTATCCGCGCGCGCGTTTGCGGCTGATGAACAC (SEQ ID NO: 412) |
| (SEQ ID NO: 320) | |
| 3300032118\|Ga0315277_10001015_12\|P | GAAGAAAAGACCTCTCAAAAAAAATTCTCCTGGACAC (SEQ ID NO: |
| (SEQ ID NO: 321) | 418) |
| 3300032118\|Ga0315277_10012802_3\|M | GTCGCGGCGGCCGATGCGATCCTGATCGATGGACAC (SEQ ID NO: 419) |
| (SEQ ID NO: 322) | |
| 3300009499\|Ga0114930_10003500_21\|M | GTGTGTTTCCTCTTAGAAAAACAAATGCTCTGGACAC (SEQ ID NO: |
| (SEQ ID NO: 323) | 420) |
| 3300011118\|Ga0114922_10000510_27\|M | GGGGGGCAAGCTCGCGCGTATGCACGGATTGGCAG (SEQ ID NO: 421) |
| (SEQ ID NO: 324) | |
| 3300017960\|Ga0180429_10052609_1\|M | GGTGGACGTCCCCCGCGATTCCCGGGTGTGTACCACGA (SEQ ID NO: |
| (SEQ ID NO: 325) | 422) |
| 3300017963\|Ga0180437_10045654_1\|M | GTTGCAATCTGTGCGTATGTATGGGTGGACAC (SEQ ID NO: 423) |
| (SEQ ID NO: 326) | |
| 3300017971\|Ga0180438_10003700_2\|P | GTTGCAATCTGTGCGTATGTATGGGTGGACAC (SEQ ID NO: 423) |
| (SEQ ID NO: 326) | |
| 3300017991\|Ga0180434_10065880_1\|P | ACTATAGGTACCCTAAAAATTCCGGGTAACTACACC (SEQ ID NO: 424) |
| (SEQ ID NO: 327) | |
| 3300017992\|Ga0180435_10008274_7\|P | GATGTAGCCGCACGTTGATTCACCGGCGATTACCAC (SEQ ID NO: 425) |
| (SEQ ID NO: 328) | |
| 3300018080\|Ga0180433_10080815_1\|M | ACTATAGGTACCCTAAAAATTCCGGGTAACTACACC (SEQ ID NO: 424) |
| (SEQ ID NO: 329) | |
| 3300009503\|Ga0123519_10002165_1\|M | GAAGAAAAAACCTCTTAAAAAAATTCTCCTGGACAC (SEQ ID NO: 426) |
| (SEQ ID NO: 330) | |
| CAAACB010000011_94\|M (SEQ ID NO: | GTTGCAGTTCGCGCGTAGGCGTGAGCGGACAC (SEQ ID NO: 427) |
| 331) | |
| SRR5251193_megahit_k177_201695_120\|P | GTCGCGATCCGCACACCCGAGCGAGTCGACAG (SEQ ID NO: 428) |
| (SEQ ID NO: 332) | |
| SRR5251487_megahit_k177_199995_1\|P | GTCGCGATCCGCACACCCGAGCGAGTCGACAG (SEQ ID NO: 428) |
| (SEQ ID NO: 332) | |
| SRR5576005_megahit_k177_1292294_1\|M | GTTGCAGTTCGCGCGTAGGCGTGAGCGGACAC (SEQ ID NO: 427) |
| (SEQ ID NO: 331) | |
| UOUK01008448_2\|M (SEQ ID NO: 333) | GCCGCCGCAGCGGCCGACGCGGCCCTGATCGATGGACAC (SEQ ID NO: |
| | 429) |
| UOUL01003058_1\|M (SEQ ID NO: 334) | GCCGCAGCGGCCGACGCGGCCCTGA (SEQ ID NO: 430) |
| 3300009652\|Ga0123330_1010394_3\|M | GCCGCAGCGGCCGACGCGGCCCTGA (SEQ ID NO: 430) |
| (SEQ ID NO: 335) | |
| 3300012949\|Ga0153798_10025413_2\|P | GTCGCGATCCGCACACCCGAGCGAGTCGACAG (SEQ ID NO: 428) |
| (SEQ ID NO: 336) | |
| SRR7811943_megahit_k177_406423_2\|M | GCCGCGGAGGCCGACGCGGCCCTGATGGATGGACAC (SEQ ID NO: 431) |
| (SEQ ID NO: 337) | |
| SRR5818194_megahit_k177_802550_7\|M | CTCTCAATGGCTAAAGATCTAGTTCTAATTGGACAC (SEQ ID NO: 405) |
| (SEQ ID NO: 305) | |
| SRR5818194_megahit_k177_802550_6\|P | CTCTCAATGGCTAAAGATCTAGTTCTAATTGGACAC (SEQ ID NO: 405) |
| (SEQ ID NO: 306) | |
| SRR6481359_megahit_k177_1860565_4\|M | ATAGCGCCCCCCGACGCAAATCTGATTAATGGACAC (SEQ ID NO: 432) |
| (SEQ ID NO: 338) | |
| SRR6049666_megahit_k177_256604_1\|P | GAAGAAAAAACCTCTTAAAAAAATTCTCCTGGACAC (SEQ ID NO: 426) |
| (SEQ ID NO: 330) | |
| 5RR2080392_megahit_k177_207267_1\|M | GTCGCAATGAGATAAAACATAGATATGTGTTGCAAC (SEQ ID NO: 433) |
| (SEQ ID NO: 339) | |
| SRR2080392_megahit_k177_207267_2\|P | GTCGCAATGAGATAAAACATAGATATGTGTTGCAAC (SEQ ID NO: 433) |
| (SEQ ID NO: 340) | |
| 3300025517\|Ga0207869_1001046_11\|M | GTGCATCGGCCGACGAAGAGCGAAGGTCAGTGACAG (SEQ ID NO: 434) |
| (SEQ ID NO: 301) | |
| 3300025572\|Ga0207864_1000213_47\|M | CGTGCATCGGCCGACGAAGAGCGAAGGTCAGTGACAG (SEQ ID NO: |
| (SEQ ID NO: 341) | 401) |
| 3300025572\|Ga0207864_1014515_2\|P (SEQ | GGCGTCGCGATCCGCACACCCGAGCGAGTCGACAGCA (SEQ ID NO: |
| ID NO: 332) | 435) |
| 3300025572\|Ga0207864_1014515_3\|M | GGCGTCGCGATCCGCACACCCGAGCGAGTCGACAGCA (SEQ ID NO: |
| (SEQ ID NO: 342) | 435) |
| SRR6505097_megahit_k177_377355_35\|M | GCCGCGTCCCCCGACGCGACCCTGATCGATGGACAC (SEQ ID NO: 436) |
| (SEQ ID NO: 343) | |
| SRR6962291_megahit_k177_1754533_5\|M | GGCGCAGCGGCCATCAGGATGGTGATCGGCTGACAC (SEQ ID NO: 437) |
| (SEQ ID NO: 344) | |
| SRR6962291_megahit_k177_1754533_5\|P | GGCGCAGCGGCCATCAGGATGGTGATCGGCTGACAC (SEQ ID NO: 437) |
| (SEQ ID NO: 345) | |
| SRR6962291_megahit_k177_3367137_15\|M | GGTGAAGCGGCCATCGGGATCGTGATCGGCTGACAC (SEQ ID NO: 438) |
| (SEQ ID NO: 346) | |
| SRR6962291_megahit_k177_3367137_14\|P | GGTGAAGCGGCCATCGGGATCGTGATCGGCTGACAC (SEQ ID NO: 438) |
| (SEQ ID NO: 347) | |
| AQT69685.1 (SEQ ID NO: 348) | GGCGCAACCCGCACACAACCGCGAATGGACAC (SEQ ID NO: 439) |
| PMBN01000097_4\|M (SEQ ID NO: 343) | GCCGCGTCCCCCGACGCGCCCCTGATCGAT (SEQ ID NO: 440) |
| PMDC01000375_4\|M (SEQ ID NO: 343) | GCCGCGTCCCCCGACGCGACCCTGATCGATGGACAC (SEQ ID NO: 436) |
| PMMM01000072_9\|M (SEQ ID NO: 343) | GCCGCGTCCCCCGACGCGACCCTGATCGATGGACAC (SEQ ID NO: 436) |
| QBM02859.1 (SEQ ID NO: 349) | ATTGCACCGGCCAACGCAAATCTGATTGATGGACAC (SEQ ID NO: 441) |
| SRR6963308_megahit_k177_1876783_1\|M | GGTGGACGTCCCCCGCGATTCCCGGGTGTGTACCAC (SEQ ID NO: 442) |
| (SEQ ID NO: 325) | |
| SRR6963352_megahit_k177_1225001_5\|P | TATAGGTACCCTAAAAATTCCGGGTAACTACACC (SEQ ID NO: 443) |
| (SEQ ID NO: 329) | |
| SRR6963480_megahit_k177_1813084_1\|M | ACTATAGGTACCCTAAAAATTCCGGGTAACTACACC (SEQ ID NO: 424) |
| (SEQ ID NO: 329) | |
| SRR6963491_megahit_k177_4304123_3\|P | GATGTAGCCGCACGTTGATTCACCGGCGATTACCAC (SEQ ID NO: 425) |
| (SEQ ID NO: 328) | |
| SRR6963587_megahit_k177_2272343_29\|M | GTTGCAATCTGTGCGTATGTATGGGTGGACAC (SEQ ID NO: 423) |
| (SEQ ID NO: 326) | |
| SRR6963591_megahit_k177_1621237_2\|P | GTTGCAATCTGTGCGTATGTATGGGTGGACAC (SEQ ID NO: 423) |
| (SEQ ID NO: 326) | |
| SRR8554444_megahit_k177_608234_1\|M | GAAGAAAAAACCTCTTAAAAAAATTCTCCTGGACACT (SEQ ID NO: |
| (SEQ ID NO: 350) | 444) |
| SRR4030068_megahit_k177_2163203_10\|M | CTCTCACCCCAGTTCGATCGAGGAAGGCGACTGACAC (SEQ ID NO: |
| (SEQ ID NO: 351) | 445) |
| SRR5487326_megahit_k177_254484_5\|M | GGCGTACCGCCTGACGGGTTTCTCATCGATGGACAC (SEQ ID NO: 446) |
| (SEQ ID NO: 352) | |
| SRR5487761_megahit_k177_404752_1\|M | GGCGTACCGCCTGACGGGTTTCTCATCGATGGACAC (SEQ ID NO: 446) |
| (SEQ ID NO: 353) | |
| SRR8554485_megahit_k177_439309_3\|P | GGCGCACCGCCTGACGGGTTTCTCATCGATGGACAC (SEQ ID NO: 447) |
| (SEQ ID NO: 354) | |
| 5RR8554511_megahit_k177_4512460_1\|M | ACCGCGGCGATACCGGCTTTCCCGGGTGACTGACAC (SEQ ID NO: 448) |
| (SEQ ID NO: 355) | |
| SRR8554511_megahit_k177_1767604_11\|P | GTCGCACCTCGCGCGTATGCACGGATTGGCAG (SEQ ID NO: 449) |
| (SEQ ID NO: 356) | |
| SRR8554643_megahit_k177_4328113_1\|P | ACCGCGGCGATACCGGCTTTCCCGGGTGACTGACAC (SEQ ID NO: 448) |
| (SEQ ID NO: 355) | |
| SRR8554643_megahit_k177_1281129_3\|P | GTTGCAACCTGTGCGTATGTGCGGATGGACAC (SEQ ID NO: 450) |
| (SEQ ID NO: 357) | |
| SRR8554643_megahit_k177_1281129_3\|M | GTTGCAACCTGTGCGTATGTGCGGATGGACAC (SEQ ID NO: 450) |
| (SEQ ID NO: 358) | |
| SRR6056591_megahit_k177_2733919_1\|P | GGGGGGCAAGCTCGCGCGTATGCACGGATTGGCAG (SEQ ID NO: 421) |
| (SEQ ID NO: 324) | |
| SRR6263259_megahit_k177_232832_6\|M | GGAGAGCGAAAAAAAGCGGGGGAGAT (SEQ ID NO: 451) |
| (SEQ ID NO: 359) | |
| 3300031539\|Ga0307380_10018846_3\|P | GTTGCAACCTGTGCGTATGTGCGGATGGACAC (SEQ ID NO: 450) |
| (SEQ ID NO: 357) | |
| 3300031539\|Ga0307380_10018846_4\|M | GTTGCAACCTGTGCGTATGTGCGGATGGACAC (SEQ ID NO: 450) |
| (SEQ ID NO: 358) | |
| 3300031539\|Ga0307380_10072822_2\|M | GGTACCGCGGCGATACCGGCTTTCCCGGGTGACTGACAC (SEQ ID NO: |
| (SEQ ID NO: 355) | 452) |
| 3300031539\|Ga0307380_10072822_2\|P | GGTACCGCGGCGATACCGGCTTTCCCGGGTGACTGACAC (SEQ ID NO: |
| (SEQ ID NO: 360) | 452) |
| 3300031566\|Ga0307378_10072489_1\|M | GGTACCGCGGCGATACCGGCTTTCCCGGGTGACTGACAC (SEQ ID NO: |
| (SEQ ID NO: 355) | 452) |
| 3300031566\|Ga0307378_10072489_2\|P | GGTACCGCGGCGATACCGGCTTTCCCGGGTGACTGACAC (SEQ ID NO: |
| (SEQ ID NO: 360) | 452) |
| 3300031670\|Ga0307374_10070813_2\|P | GGCGCACCGCCTGACGGGTTTCTCATCGATGGACAC (SEQ ID NO: 447) |
| (SEQ ID NO: 354) | |
| 3300031965\|Ga0326597_10006968_2\|P | GGCGCAACCCCGCACATGCGGGCGGGATGACAG (SEQ ID NO: 453) |
| (SEQ ID NO: 361) | |
| 3300017540\|Ga0180217_1000254_36\|M | GTCGCACCCCGCGCGTGCGAGCGTGTTGACAG (SEQ ID NO: 454) |
| (SEQ ID NO: 362) | |
| 3300014494\|Ga0182017_10000840_9\|P | GCCGCGTCCCCCGACGCGACCCTGATCGATGGACAC (SEQ ID NO: 436) |
| (SEQ ID NO: 343) | |
| 3300014839\|Ga0182027_10004505_3\|M | GGTGAAGCGGCCATCGGGATCGTGATCGGCTGACAC (SEQ ID NO: 438) |
| (SEQ ID NO: 346) | |
| 3300014839\|Ga0182027_10004505_2\|P | GGTGAAGCGGCCATCGGGATCGTGATCGGCTGACAC (SEQ ID NO: 438) |
| (SEQ ID NO: 347) | |
| 3300031715\|Ga0307476_10010105_2\|P | GGAGCGCCCCCCCGACGCGGCCATGATCGACTGACGG (SEQ ID NO: |
| (SEQ ID NO: 363) | 455) |
| 3300031715\|Ga0307476_10010105_1\|M | GGAGCGCCCCCCCGACGCGGCCATGATCGACTGACGG (SEQ ID NO: |
| (SEQ ID NO: 364) | 455) |

TABLE 14
Non-coding Sequences of Representative CLUST.089537 Systems

>3300009161|Ga0114966_10008307_7|P
ACTTTTTCTACCATGAAAAAAAACCCATCTGATAAAACAATAATGAACCTAGAATTTATGTTTTTTTATATAGAATGGATGAAA
AGATTAGAAACTAGTCCTGATTATAATAAACCTTTTATTGAAGAACTGTTTGGGATTACTATTTAGATTATCGTTAGCTAAAGA
CAATTGAAAAAATGACTTGAAGATTCTGAGCAAAAGATTAGGATTTTAAAAGGAGAAATTCCGTGGGCACAAGAGCCATAAAAG
CAAAGATTATTTGTGACAAAACAACACTTGGTTATTTGTGGCGATCTCACTGTATGTACAATCAGAAACTCTCTGAGTATATGA
AATTACTTTTTAAACTTCGACGTGGTAAGATTGGTAAAAATAAAGATTATGCGAATAAAAATGAGGAAGAAAAGCAGAAAATAA
TTGACAATCTTGAAGCAATACTTAGACCTCATCTGCAAAAAATGCACTTTACCACCAAAAAAGAACGCTCACTTGACGTTCCAG
AACACCCACTTGACGTTCCTTTTTGAGCTTGTTAAGATATGGTCATTGAGGAGTTTTGGTGGAGTTACGACCATCCCACAGACA
TGGCAAGCCATAGCTGAAAGCCTTGATAGCCTTCGTTTTGTGTCCAAAGTCTGCTGATCTGACTGCTTTCGGGCATTTAGGATA
TTACAAAAAAGGAAACTTTTTTGGCGGCGGGCAAGGCGAGGGCAATTAGAAGTAGATCTTTTGCTGTTTGACAAATTTAGTCAA
TTTTCGTCGTATTCTATTGATGCGAGTGACGAGGTATGATCGTTTTTGCCGTAGCTGCTCGCGAGCTAGGTGTAGTAACGACTT
AAGCACAGCTAAGCATTGTAAAAATTTGAATTTAAACCCTTATTTTTCAAGGTGCTCGTCAAGTGTGTTCTAAGTTGTTGTAGA
GACTTCGTTAAGGACTAGGGCCCCGTTGGAAAAAGAAAGAGTTAGATCATCTAATCCATAAGCATTGGAATATTTCCAAAGATC
AAAGATAGGAATCCAAGTGGGAAAAAAGAAAGTAGGGGGAAAAGGAAAAATAAAACAAAAATAATTTTCAAAAGAGATGTTCTG
GATTCAGAAAAAAACCAGAAGAATTTAAAATTGTGAAGGGTAAAATCTGTTTGGGGAGGAGGGTATTTCTCCACCGAACTACTC
AAGATTCTCTAAAATTAGGAAAAGTTTATGAAGACATCTAAGGCAGAATTTAAAATTATTAAATTAACATTTGCTGATAAAAAA
TGGGGACTAGTATTGATTTTTGTTGGTATTTGTTTGGGTCCTGTGATTGTAGGTATTCCATTAATTATACTTGGTGTGGGGATG
TTATGCATA (SEQ ID NO: 500)
>SRR6481359_megahit_k177_1860565_4|M
CTGCAATCGGACCTCGAAGCTGAAATGAACCTCAAAGACGACCAGACAATGATTATCGATATGGGTCCGAACGAAAAAGAGGCC
AGAGACGCAGCCGCTGTAATCGGCCAGTCCCTGCCGAAATTCGAAACCAGAATGATCGTCGTATAAAATTGACATCCCGGTTAT
GTTTTATATGATTAGGCATAATAGAGGATTACGAAAGGAGCTAATATGTCGGTGAGGTCTTTTCAAGCAAAAGTGGAATGCGAC
AAACAAATAATGGAACATCTTTGGCGGACGCACACGGTTTTCAATGAACGGCTTCCGGTAATTATCAAAATTTTGTTCCAGATG
AAACGGGGCGAATGCGGCCAAAATGATTCGGTCAATTTGCACAGGCGATTTCTGATAGATGATGCGTTAAAGAATTATTATGGA
TTCAAAAAGCTGCCTGAGAAAAAGCAAAAAGAGGCAATAGCAGCTATTGAGAACTCGCTGAAAGAAAAATTATCTACAATTCAC
AAAATATAAAATATTTTCCTTGTGTCTTAACATAGTTGAACATTTTTACTTGTCTTTGCCGATATTCTGAAAAAGGGACAAATT
GTTGTCCCATAAAGGATAACGTTCGGGAGGCAAGACAATGCAAGCTCTTTCAAAATTCTGTTGTCAAAATAAAAGATGCACGGA
TTACGGAAAACGTGGTGCAAATAATTTATCGGTGTGCGGCAGATTCGGCAAAAATGACCATATCCGGCTGCTATACTGCCGAAC
ATGCAAGAAGCGATTTTCCTATAATTTTTGCTGGCCGGTACGGACACTTCGTTTACAAGGCCAAGATGAGCGGTGGCACGCAAG
GACACCTGCGATGGCCGCGGATTTGACAGATCATGTCTGGTCTTTGCATGAATGGTTGAGTTATCCGGCTTTTCAATTAACATA
AGACACAAGGAATATTTTTCTTGCAGCATAAATATGCAAAAAGTACAATAATCTCGTGGAGTAAGGTAGGAGTGACGCCCGCCC
GTTTAGCGTGCTATAGGCCGCTGAATGCCACGTAGCGATATGTTTTGAGTGTCAAGAGCTGCTGACCCAAAGGCCAAAAGCTGA
GTAGGGCTTGATAGTCGTGGTTATTACCATGCAATGCGGCAGCGACACATATCGCGTTAATCAAATTTGCGTTGTCGTCAAGAT
GGATTCAGGCCATTGCGCAAGTGTCCTCTTTGACAAGTTCAGACGCGAGTGCGACGGTGGTGAAGGGGGGCACTGGGAATGCTC
GCAGCGGGAATTTGTGCAACTGCTTCCAGGATTTGAGGAACTATTGACAATATGGTTTGGCGCGAATTTTTACAGTTTTTTTAC
CTTGCTCGTAAACCAAACGCTAACCGCAGATGCAAAAAGAACTTGCAGAAGAAGCCATCAAGCCACAGAGAACAGAGGAATTTT
CATAATTACGCCACTGCATATAAATCCTTATGTGCCAAATACTGATGAATAAAAAATATCATAACTTTCAAATCCATCCAAGGG
CGAACCCTTTTCAGCCGCCTAACATGATAAGGCAGCATACTAACACGACTACGACCTTTGAACAAGCTATACCAACGCTCCACC
ACACTACGTCTTTCCAGCAGCCGTTGTCCCTCAACACTCTGCAACATACAATACGAAGCATTACGACCGGGTTGT (SEQ ID
NO: 501)
>UOUK01008448_2|M
CTGGAGAATGCATTGCGGGATGTGGTTAACCTCAAGCAGGATCAGGTGCTAATTGTCGATTTGGGGTCGAATGAGGAGGCGGCG
CGCGAGTCGGCGACGACGCTCGGGCCGGCGTTGCCTTCCCAAGACGAGGGGATCGTGGTAATCTAATCTGAGCGGTTCAGCACC
GGTCCCGCACCCGCGGCGATAGCTATTCTTGGAGGTGTAGACGTGGGAGTCCGGGCACTTCGAGCGCGAATCGAGTGCGATCGA
GAAACGCTTATGCACCTTTGGCGCACGCACTGCGTCTTCAATCAACGCCTACCCGCGCTGCTGAAACGCTTGTTCGCAATGCGG
CGAGGGGAAGTGGGGGGGAACGAGGCGCAGCGGCAGGTTTACCAACGTGTTGCGCAGTTTGTTCTTGCGCGCGACGGCGATCAA
GCCGTCGCCGCCTTCCGTGCTCTCCCACCGCGGGATTCCCCCGCCAGGACCTTAGCCGTTAAAAGGGTCGAAGATACCCTTCGC
CCACAGTTGATGCGCGTGCACAAACTTGCGGATGCAGGGGTTGACAGCCCCTTCTGAGGCTCTGATATACTGGGTTTGTGGGGC
GAGCCTTCGGGCGGTATATCCGAGCCGAAGTCCACGTAGTCGTCGCCCCTGTGTGTCAACACGTGCTGACTCCAAGGCGAACAG
CCGAAGGAGGCCCCGCAAGGGTGACATCGTGGCGGGCTCGCACGCCCCGGCGGCACGGACAGCGACGGCATTGATCAGGTCCGC
GTCGGCGCGGGCGGCGCTTCGCGGCGGTGTTCTTTGAAAAGTCGGTCGTCGCGGCCTTGGCCGAGGATAAAGTCGGTGCGACGC
AGCCAACTGCGACCAACGCCGTGGGCGCGTCAGGGCGCCCGCGAGTGCGACGGTGGTGAAGGGGGGGCCTGGGCACGCTCGCGA
GGGCGTAAGTCTTTGAGAATTGAGGACTTGCAGCTTGCTGGTTTTCGGATGCGACCGAACAGTTGCCGTACGTGCGGGTCACGC
TCGCAAACGCACGCGCAAGTTCGGTATTTACAGCAACTTGCGAGTGCG (SEQ ID NO: 502)
>3300012949|Ga0153798_10025413_2|P
CAAGCCGGCGACGTCGAGCGCACCTATGCCGACCTGACGCGGTCGAAGGCAGAACTCGGCTACGACCCGCAGGTGGAGATTACG
GAAGGCCTGCGGCGGTTCGTGGCGTGGTATCGGGAGAATCGGGAGAGGTATCGGCTGGAGGTGTGAGGGGGATTCGGGAGCGAC
GAAGCGACGGAGCGACGAAGGGGAAGGCGTATGATGCATAGGGGCAGGCAACTAGCCCGCCCTACTGCCTGATCTTCTCGACCG
GCCACATAATAGTGGGCGCATCTCCACGGGCACAACAGTGAGCGAGTCAGGTCGGCATGACTTCCACAGATCTGATTGTCTGTT
CTTGCATGGGAAATTGCACAGTCAACTGAATCCACGTTATCCTTGATCTTGCTGCCAAAGGAGGACCAGGTGGGGATCAAATCT
TGGCGCGTTAAATTATGGGTGGAATCGCCTGAGATACGCGCGACTCTGGAATATTGTCTCAGCCTGTGGAACACTTCGGCTGCT
TTACTTTGTCGGCATATACTAGCGATGCGTCGTGGCGACTTTGGCCCGGAAGGGCAAGCGATCTGGGAGCACCTAAAGAAAACC
CCACATAATTTTCATGTCCTTTATCCTATCTCCAATGGCAGCGGCATAGAAAAGACTACCGGATATTACCCCGATGCACGAGCA
TTCGTTGTCTTCCTTGGAACATTTCCCACTGTGCAGACCATCCAGCGCCAACCGCGGATCTACGAGATCAATGGCCAGCGCGTT
GCTCTGGATGAGATACAGCAGCGCGCTGTTGAAATCCTTGCCAGTCGCCGCGCAGGTGATACACCCTTTTAAGATTTGTTTGCG
GTATCAGACAGGAATAGTTAACATTTGCGGTGGATCAGGTCCGAAAGGGCCGGCCCGAGGTTCGGCTATAGGCCCAACCTCGCA
CCAGCGGGCGCTGTCTAGCCGAAATTGGCGAGCGAGGCTCTTCTCAGGGCCCGCTCGAAACCTGTGGCTACGATTACGTGGCTG
CGTGGGCTTTTCGGCACCCCGTTGGACACGCTTCGGTATGCGGAACGCGAACCACCAGCGCGCACCAGTTGCATAGCGGATTCG
CGTTTAGCGCAAGTTCTTTCTCAAGCGAACTGTGCAAACAGTGGGTCAGCAAATCGCTTCTGTTGCATTTGCCTGGACGAGACG
ATTCGCGAAAGTGGACTGTAGCTCTTGGTCCTGCCTTTAACTAGAGCAAGGCCGCCGATACCACTGGCGACGGCTTGCACGCCG
ACAGGGTCGCGATCGGTAACGTCCTGAATTGTGCGCACATTTGAAAAGGCAGCTCGTCCGCTGGAAGGTGTTGGTGTGTAGACA
ACCCTTACCAGACAGGAGAGCTGCATGGACAGCGTAACAGAAGCGGCGCAGG (SEQ ID NO: 503)
>CAAACB010000011_94|M
CAACACGGCCTGGGCTACGCCCCGTTCCCCGCCTCCGTGATTTCCCCCAGGAACTGGACCGACCACTGCCACCTGAACCCCAAC
GGCGAGCGCGAAAAAGCCACGCACATCGCCGACCATGTCCGCCCCTTCATCCGCGCTCCGCGATAAGCATTTTCGGACGGAATA
TGTCTCATCGGATGCACTTGACGGTGGCTGCGCCGCCGAGCGGAGTGCCCGTGCTTGCCCATCCATCGACCCGTTGGCATCCTG
TGAACAGGAACCAGGCACATGTCCACACGCGCTATTCAGGCCAGAGTTGTCGCCGACAAGGCACTGCTGCAAAAGCTCTGGCTG
ACCCACAGGGCGTTCAACGAACATTTGCCCCATTTTTCGCAAACCCTGTTCCGCATGATGCGGGGCGAGTTGGGCGACTCCGAT
CGCTTCGCCCTTGGTGAAACCGCCATCGCTGCCGCCATGGACTTGTGGCATCGCCCCAAGCCCGAAAAAGAGGCTATGCGAAAA
TCAATCGAAGCCCAACTCCGATCAAAACTGGAAATCGAACACAAGCTCGCCGAACCGCTGCCCTAAGGCTCTTCAAGGAGCTTG
CGCTGGGCACCCAGGTTTTCATACGTTGATCGCGTGGAGCAAGGGACCGGGTCGCGTCGGTTTCCACCATTTGGCTATAGGCCA
GGCGGTTGCCACATGGCGCCATGTTTTTGAGTGTCAAGATGTGCTGGTCCTAAGGCGACACGCCGAAGGGACTTTACCCTCCGG
GCAACTGGAAGGGGCGGCACAGACCCATGGCGCGTTCACTCCTACGATCTTTGAAGCGCGAGCTGCGACGTTCGCGAACCTATA
GCGGACAACCATCTACAGAGAGGTCCGCGGGCGGCGCAACCACCGCCCCCACGAGGACTTGTCACGCTCGTTCTCCGCTCGCCT
CTTGCGGGATCGGGAATCGCGTTTCGCTTCGCGAACTGGCGATGTGCGCACTTGTGCTTCAATCCTTTGCACTGCAAGG (SEQ
ID NO: 504)
>3300020109|Ga0194112_10008260_1|M
GCCGGCTGGACCTCCGAGTTCCCCGGCCAGCCGCCCCCCACCCGCATCGCCCTGGCCGGGCCGGACGCCCTCCTGTTCTTCTAC
CTCACGCTCCTCCAGGACATCAACACCAAGACCCTCCTCCCGCCCGACCTCGAATTTTACTGGTAGCCGGGCTAGATAGTCTCT
CTTGCGGAAAGTGCGATCACAGGCGGGACGCCTGTGCCACCGCTGAGACAAGGGGCTTGGTGGCACAGGCCTCTGGCCTGTGAT
TGGGGCACCGAGGGCGTGGATACGATGGACATGGTGGACCCCGAGGCCCGCGCCGCCCTCTGGCGCACCCATGGGGTCTACAAC
GAGTGCCTCCGGTTCGCCCTGCGCCACATGCACAAGATGAAGCGCGGGGAGGCCGACCCGCGCTACGCGGAGATATTCGGCGCG
ATCCGCGTGGAGAGGCCCAACAAGGACAAGCGGGTCTTCCGCCTGACTCCCAGGGGCCAGCCAACCGTGGAAGTGGACATGGCC
GACGTGGAGAAGCGCATCCTCGCGCGGGGAAGGGCCGAAGACCTCTGCCGCGGCAAGCCCACGCCATTTTGAGCTTGACTTTCC
CGGCCAAACTGTCATGAATGGTGTTGGCCCTGCGTGGAATAGCGCGGGCCGCCGGCGGGGCTGCTATAGGCCGCGTCGGACTAC
GTCGGGCATCCAGTTGTTACGGCCGCGTGGGCCTACGGGTTTCGGCCCAAAGGGCACAAGACCGGATGGGTCACTGGACCTGTC
AGGGCGGCGGCCAGGCCCGGCGACACGACCGAGAATGTTGGGGAAAAAGGAGGCCCGGACCGCCAAAGAATGGCCCGGATGGGG
CGCTTTTTTCAGCCGAAATGCGGGCTAACTCCTTGCGCCCTCTCGACTTCGGCGGTATCTGGTGTAGGCGCGGGTAGACTTTTC
GGACGATGTCAGGGCAAGGGCGAAGGGGTCAGACCTCAATTCTCTACTTTCCTGCCCCGGGTGGTGTGCCGACAGCGGCGTCGA
GCCGCCGCAGTCCGACGGGCTGACGCACGCTCGGGTGCCCGTGACGGTGCGAGAGGCATGGGGTACGGCGGGTGGCTGGGAAAG
GACAACAGGGACCACAGGGACAAC (SEQ ID NO: 505)
>UOUL01003058_1|M
CTGGAGAATGCATTGCGGGATGTGGTTAACCTCAAGCAGGATCAGGTGCTAATTGTCGATTTGGGGTCGAATGAGGAGGCGGCG
CGCGAGTCGGCGACGACGCTCGGGCCGGCGTTGCCTTCCCAAGACGAGGGGATCGTGGTAATCTAATCTGAGCGGTTCAGCACC
GGTCCCGCACCCGCGGCGATAGCTATTCTTGGAGGTGTAGACGTGGGAGTCCGGGCACTTCGAGCGCGAATCGAGTGCGATCGA
GAAACGCTTATGCACCTTTGGCGCACGCACTGCGTCTTCAATCAACGCCTACCCGCGCTGCTGAAACGCTTGTTCGCAATGCGG
CGAGGGGAAGTGGGGGGGAACGAGGCGCAGCGGCAGGTTTACCAACGTGTTGCGCAGTTTGTTCTTGCGCGCGACGGCGATCAA
GCCGTCGCCGCCTTCCGTGCTCTCGCACCGCGGGATTCGCCCGCCAGGACCTTAGCCGTTAAAAGGGTCGAAGATACCCTTCGC
CCACAGTTGATGCGCGTGCACAAACTTGCGGATGCAGGGGTTGACAGCCCCTTCTGAGGCTCTGATATACTGGGTTTGTGGGGC
GAGCCTTCGGGCGGTATATCCGAGCCGAAGTCCACGTAGTCGTCGCCCCTGTGTGTCAACACGTGCTGACTCCAAGGCGAACAG
CCGAAGGAGGCCCCGCAAGGGTGACATCGTGGCGGGCTCGCACGCCCCGGCGGCACGGACAGCGACGGCATTGATCAGGTCCGC
GTCGGCGCGGGCGGCGCTTCGCGGCGGTGTTCTTTGAAAAGTCGGTCGTCGCGGCCTTGGCCGAGGATAAAGTCGGTGCGACGC
AGCCAACTGCGACCAACGCCGTGGGCGCGTCAGGGCGCCCGCGAGTGCGACGGTGGTGAAGGGGGGGCCTGGGCACGCTCGCGA
GGGCGTAAGTCTTTGGGAATTGCGGACTTACAGCTTGCTGGTTTTGGGATGCGACCGAACAGTTGCCGTACGTGCGGGTCACGC
TCGCAAACGCACGCGCAAGTTCGGTATTTACAGCAACTTGCGAGTGCGGCA (SEQ ID NO: 506)
>3300025572|Ga0207864_1014515_3|M
GCGTCTACGGCAATGCCAGCAAGGTCCCCTTCAGCGAAGAAGACCCCGTCGATCAGCCCATCAGCCCCTACGCAGCCACCAAAC
GCGCCGGGGAGCTGATCTGCCATACGTTCTGGCATCTGTACAAAATGCCGATCTTCTGCCTGCGGTTTTTCACCGTCTACGGCC
CCCGCCAGCGGCCGGACCTGGCCATTCACAAGTTCACGCGGCTGATCGACGCCGGCAAGCCGATCCCCGTCTTCGGCGACGGCA
GCATGTCGCGCGATTACACGTATGTGTCGGACACGGTGGCTGGGATCATGAGCGCCCTGGACCGATGCGACCGCTACCGCATCT
ACAACCTCGGCGGCTCGAATCCGGTGACGCTCACGCAGTTGATCCAGGAGATCGGGACCGCCCTCGGCAAGCAGGCCATCATCG
ACCGCAAACCCACCCAAGCCGGCGACGTCGAGCGCACCTATGCCGACCTGACGCGGTCGAAGGCAGAACTCGGCTACGACCCGC
AGGTGGAGATTACGGAAGGCCTGCGGCGGTTCGTGGCGTGGTATCGGGAGAATCGGGAGAGGTATCGGCTGGAGGTGTGAGGGG
GATTCGGGAGCGACGAAGCGACGGAGCGACGAAGGGGAAGGCGTATGATGCATAGGGGCAGGCAACTAGCCCGCCCTACTGCCT
GATCTTCTCGACCGGCCACATAATAGTGGGCGCATCTCCACGGGCACAACAGTGAGCGAGTCAGGTCGGCATGACTTCCACAGA
TCTGATTGTCTGTTCTTGCATGGGAAATTGCACAGTCAACTGAATCCACGTTATCCTTGATCTTGCTGCCAAAGGAGGACCAGG
TGGGGATCAAATCTTGGCGCGTTAAATTATGGGTGGAATCGCCTGAGATACGCGCGACTCTGGAATATTGTCTCAGCCTGTGGA
ACACTTCGGCTGCTTTACTTTGTCGACATGTACTGGCGATGCGTCGTGGCGACTTTGGCCCGGAAGGGCAAGCGATCTGGGAGC
ACCTAAAGAAAACCCCACATAATTTTCATGTCCTTTATCCTATCTCCAATGGCAGCGGCATTGAAAAGACTACCCGGTATTATC
CCGATGCACGAGCATTCGTTGTCTTCCTTGGAACATTTCCCACTGTGCAGACCATCCAGCGCCAACCGCGGATCTACGAGATCA
ATGGCCAGCGCGTTGCTCTGGATGAGATACAGCAGCGCGCTGTTGAAATCCTTGCCAGTCGCCGCGCAGGTGATACACCCTTTT
AAGATTTGTTTGCGGTATCAGACAGGAATAGTTAACATTTGTGGTGGATCAGGTCCGAAAGGGCCGGCCCGAGGTTCGGCTATA
GGCCCAACCTCGCACCAGCGGGCGCTGTCTAGCCGAAATTGGCGAGCGAGGCTCTTCTCAGGGCCCGCTCGAAACCTGTGGCTA
CGATTACGTGGCTGCGTGGGCTTTTCGGCACCCCGTTGGACACGCTTCGGTATGCGGAACGCGAACCACCAGCGCGCACCAGTT
GCATAGCGGATTCGCGTTTAGCGCAAGTTCTTTCTCAAGCGAACTGTGCAAACAGTGGGTCAGCAAATCGCTTCTGTTGCATTT
GCCTGGACGAGACGATTCGCGAAAGTGGACTGTAGCTCTTGGTCCTGCCTTTAACTAGAGCAAATGTCTCGGCTGGCGATATCG
TCGTCGTCGGCGTCGCGATCCG (SEQ ID NO: 507)
>CAAACX010000652_28|M
GAGGATGGACCAGACGGCGCCGCCGCGCTCCTTGAGCATCGCGGCAAGAACGTGCAGGCCGGTGACCTCCGGGTTCTGACGCGC
CGCGGCGTCGGACTGGGCGTCGGCAAGGGTCTGCTGGGCGAGCGTGGTGAAGCGGTCGGTGCGCATGGGTCGTGCTCCCGAGGG
AGTCTGGCTGACTCGGTCTGCCGGATTGTTGGGCAAAACGGGGGCCAGTCGTGAGAGGCTTTGGAGGGGGGTTTTACGGAGCGC
GGACTGCCGGAATGGCAGGGGGACGCCGGCCGTCGGCCAACCGCCCCCCGGGCGCCTCCCGGCAAGTTTCGTTAGGATGGTCGC
CGTGGAGGCCGCCTCAGATGGGTGTTAAAGCCTGGAAGGCGAAGATCATCGTGGCCGACCCGGACCTGGCGGCCGCTCTGGACC
ACACCGTCCGGCAATGGAACCTCTGGGCGGAACAGGCCTGCATCGCCATCATGCGCCTGCGCCGCGGCGACTACGGGGACGAGG
TCCTGATCGGGACGTTCCCGCAGGTCCGGCGCATCTCGCGCGACCCGCCGGTGCTGTCGATCGCCGATGTCCGGGTGGACCAGC
GGGAGGCGGATCGCCTGGCCGCGGCGTGGCTGAGCGAACTGTCGGTCGGCCCGACGCCCTTCTGAGGTGGCGTCGGATGGGGGC
TTCCGGTATACTGCCGTCGCTACCGCCTGCACAGGGCGGCGCGGCGGACCGGCTATAGGCCCGTCCGTCGTACGTCGGGAACTG
TCGAGCCGGGAGTGACGTGGCGGGGCCTCGGCCCTGTTCAAGACCTTCACCCCTCTCGTGGGGGTGGTGGGCTTCCCGGCAACC
CGGCGGCTGATCCATCACGCGGCCGCCGCGAATATCGAGCGCCCACGCCGACGCCGGGAGGTTCGCGGAAGTCGCAACGCTCTT
TGACAGCCCAAGTTGCGCTCAGGAGGCCCGATGACCGGCTTGGCTCTCCGTTCAAAAACAGCCGATTCGCGGAGGAACGCTCCG
AAGTGCCGACCGGTCAACCTCTTACGGGCGGGAGCTACTACGAGGCGATGCGGATCGGCGGGAACGCCCGCTGCATCGGCCG
(SEQ ID NO: 508)
>3300018080|Ga0180433_10080815_1|M
TTCGAGATCGACACCGAATCACGCATAGGGTGTCAGGAGATAGTACCCTAAAAATTCTGAGTAATCTACACCTGTCGCGTTCTC
CTTGTTGACCATGATTTTATTAGAGATTGGTAAAAATATTAGATTGAAGATCGAATATATTAGATATTAGAGAAAAGTTATTGG
AGATAGATAATGTCAGTGAAAACAATTCAAGCAAAATTAGAATGTGACAGAGAGACTTTAGAGACTCTATGGAGAACTCATACG
GTTTTTAATGAAGGTCTTTTACCTATTTTAGCTTTATTTTTTAAGATGAAGCGTAGAGAAACAGGATCAACAGAATTACACAGA
AAGTTCTATGATTGGTCAGTAGTAGACAAGTACTTTACTTTGCTTAGAAGTGATAATTATAAGGAACAGAAAAAAGTGATTGAA
GAAGAACTTCGAGAGTTTTTGAGGAAAGAGCATTTTCCTCAAATGGCTCTGAATTAAAAAGTGGAGAATTTATCCAATGCCTAT
AGGGAAATTGGATAACCACACAGGCCTTGGTTTTGATGGTGAATATCTGTTGATTATTTGGTCTGAGGGCCTTAAATAAATTAC
ATGGATAGTA (SEQ ID NO: 509)
>3300025572|Ga0207864_1000213_47|M
GAGGATGGACCAGACGGCGCCGCCGCGCTCCTTGAGCATCGCGGCAAGAACGTGCAGGCCGGTGACCTCCGGGTTCTGACGCGC
CGCGGCGTCGGACTGGGCGTCGGCAAGGGTCTGCTGGGCGAGCGTGGTGAAGCGGTCGGTGCGCATGGGTCGTGCTCCCGAGGG
AGTCTGGCTGACTCGGTCTGCCGGATTGTTGGGCAAAACGGGGGCCAGTCGTGAGAGGCTTTGGAGGGGGGTTTTACGGAGCGC
GGACTGCCGGAATGGCAGGGGGACGCCGGCCGTCGGCCAACCGCCCCCCGGGCGCCTCCCGGCAAGTTTCGTTAGGATGGTCGC
CGTGGAGGCCGCCTCAGATGGGTGTTAAAGCCTGGAAGGCGAAGATCATCGTGGCCGACCCGGACCTGGCGGCCGCTCTGGACC
ACACCGTCCGGCAATGGAACCTCTGGGCGGAACAGGCCTGCATCGCCATCATGCGCCTGCGCCGCGGCGACTACGGGGACGAGG
TCCTGATCGGGACGTTCCCGCAGGTCCGGCGCATCTCGCGCGACCCGCCGGTGCTGTCGATCGCCGATGTCCGGGTGGACCAGC
GGGAGGCGGATCGCCTGGCCGCGGCGTGGCTGAGCGAACTGTCGGTCGGCCCGACGCCCTTCTGAGGTGGCGTCGGATGGGGGC
TTCCGGTATACTGCCGTCGCTACCGCCTGCACAGGGCGGCGCGGCGGACCGGCTATAGGCCCGTCCGTCGTACGTCGGGAACTG
TCGAGCCGGGAGTGACGTGGCGGGGCCTCGGCCCTGTTCGAAACCTTCACCCCTCTCGTGGGGGTGGTGGGCTTCCCGGCAACC
CGGCGGCTGATCCATCACGCGGCCGCCGCGAATATCGAGCGCCCACGCCGACGCCGGGAGGTTCGCGGAAGTCGCAACGCTCTT
TGACAGCCCAAGTTGCGCTCAGGAGGCCCGATGACCGGCTTGGCTCTCCGTTCAAAAACAGCCGATTCGCGGAGGAACGCTCCG
AAGTGCCGACCGGTCAACCTCTTACGGGCGGGAGCAGATGCAGCCAAGGGGCGGACTCGAACCGCCCCTCGCACGTATCCGCCG
GAAAAGGGCGAATGCCAGTGACCGAAGAACGGGTCCGGCCGTTCCGCAACACTCAATCGCCGCCGCGGCAATCAGGCAGAGCCC
GCCTCAGCAACATCATCCCCCGCGCCCCCTGCTCCGCCCTTCTGAGATCGCGCAGGCCCTCAACCCGTCTACGCCACCACGTCC
AGCCGCTCCCCCACTCCCGGCGGGCTCGCGCCCTGGGCGACCTTCGCCGCGGCCTGGATCATCTGCACCGCGGCCTGGCCCTGC
TGCTCGGCGTGGTCGAGGACCTTCCGGGCGACGCGGATGCTCGCGGCGGA (SEQ ID NO: 510)
>3300009652|Ga0123330_1010394_3|M
CTGGAGAATGCATTGCGGGATGTGGTTAACCTCAAGCAGGATCAGGTGCTAATTGTCGATTTGGGGTCGAATGAGGAGGCGGCG
CGCGAGTCGGCGACGACGCTCGGGCCGGCGTTGCCTTCCCAAGACGAGGGGATCGTGGTAATCTAATCTGAGCGGTTCAGCACC
GGTCCCGCACCCGCGGCGATAGCTATTCTTGGAGGTGTAGACGTGGGAGTCCGGGCACTTCGAGCGCGAATCGAGTGCGATCGA
GAAACGCTTATGCACCTTTGGCGCACGCACTGCGTCTTCAATCAACGCCTACCCGCGCTGCTGAAACGCTTGTTCGCAATGCGG
CGAGGGGAAGTGGGGGGGAACGAGGCGCAGCGGCAGGTTTACCAACGTGTTGCGCAGTTTGTTCTTGCGCGCGACGGCGATCAA
GCCGTCGCCGCCTTCCGTGCTCTCGCACCGCGGGATTCGCCCGCCAGGACCTTAGCCGTTAAAAGGGTCGAAGATACCCTTCGC
CCACAGTTGATGCGCGTGCACAAACTTGCGGATGCAGGGGTTGACAGCCCCTTCTGAGGCTCTGATATACTGGGTTTGTGGGGC
GAGCCTTCGGGCGGTATATCCGAGCCGAAGTCCACGTAGTCGTCGCCCCTGTGTGTCAACACGTGCTGACTCCAAGGCGAACAG
CCGAAGGAGGCCCCGCAAGGGTGACATCGTGGCGGGCTCGCACGCCCCGGCGGCACGGACAGCGACGGCATTGATCAGGTCCGC
GTCGGCGCGGGCGGCGCTTCGCGGCGGTGTTCTTTGAAAAGTCGGTCGTCGCGGCCTTGGCCGAGGATAAAGTCGGTGCGACGC
AGCCAACTGCGACCAACGCCGTGGGCGCGTCAGGGCGCCCGCGAGTGCGACGGTGGTGAAGGGGGGGCCTGGGCACGCTCGCGA
GGGCGTAAGTCTTTGGGAATTGCGGACTTACAGCTTGCTGGTTTTGGGATGCGACCGAACAGTTGCCGTACGTGCGGGTCACGC
TCGCAAACGCACGCGCAAGTTCGGTATTTACAGCAACTTGCGAGTGCGGCA (SEQ ID NO: 506)
>3300015360|Ga0163144_10184575_1|M
GAATTGAATGCAACCGCGAAGAATTACAACATCTTTGGCGGACTCACTGCGCCTTCAACGAAAGGTTGCCATCAATCCTTTCGG
TCCTGTTCAAAATGCGTCGTGGAGAATGGGGTGACACCGAACAGATAAAGAAAAAAATGCAGGCTTTCTTCTTTCTCGATGGGC
AGGCCGTCCAGGCATTCTACGATTGGAAGGGCAAGCCGGAGCCGGAAAGAAAAACGTTTTTCGCGGCAATGGACGGCAAGCTGC
AGCCAGCGCTGAGAGTGGAACATAAATTGGATGGTCCGACACCGTTTTAAAATTCGAAGACTTGCGGCAGGATGCAATCAGGTT
ACGTTTACGTTTGTGGGTTGTACCCGCTCGGCGTGCTATAGGCAGGCCGGGACCACAAAAGCACTGCGTTTGAGTGTCAAGACC
TGCTGACCGAACGGCCAAAAGCCTAGTAGGGCCAGACTGAGGAGGGGCAACCCACCAAGGGCGGCAGGAACACGCAGTGAGTTG
TTCAGCTTGCGTTGTGAGGACTGTTGGTGGGTCTTTGACAACTCATTTTGCGCGGCTTTTTGCCGCGAGCGCGGAGGTGGTGGT
GCGGGTGCGTCGTTGCGCTCGCACCTACTTAACCTCTTACGGTGCAAGGGCCTCGTCAACGGAAATGGTGAGTCGCATGTGTCT
CGATCAGTTGATTCCACGCAGGTGCTCGTTATGGGACTGCCAAGTCCCGGTCAAATCATGGTGTGCGAGCGCGACA (SEQ ID
NO: 511)
>3300017960|Ga0180429_10052609_1|M
TTCTACAGCAAGACTTAGCCGAAATGCCCCCAAGATGTTGCGGTGTCAGCAAAGCAGGCAATACAATATCCGGCACCAAATCGC
CCGAAGTCTTGCTGTAGAGAAAATGTACGCCTGACCCCGTTGTCCCCCCTTGCCCGCCCCAAGCGATGACGGCAAGCGGAGTAC
GTCTTCTACTGAATCGAAAGGACCCGAAATGTCACAAAGGGCCCTTGCCGTACGACTTCTGGTTGACTCTGAAGACGATCGCGC
GGCGCTGTGGCGAACGCACCGCATATTCAATGAGCGCCTCGGATGGGTGCTGCGTCAGATGCATCGGATGAAACGGGGCGAACC
GGACGCGCGCGAACTCCCGAAGGTCAAGAAGCTGCGCGAGGGCGTGTATGAGCTAGCGAAGCCTGATCACGCGCCCAAAGAAGT
GAAGCCTGCCGAGCTTAGGAGTGCGGTTAGCGTCGCGGCGGCCGCGATGTGCCGCGGGCAGGCGAGCCCCTTCTAGGCATTGAC
TTCCCTTCTGTACCTGATACGATATGGATCAGAGTTGCGAGATTACCGTAACCTGACCGGCAGGGCTATAGGCCGTGTCGGTGA
GCGCCGGGAACCAGTGGTTATGGCCGCATGGGCCTACGGGTTACCCCAATGGGCACGAAACCGACCCGGTCGGCTTCGCCGATC
CAGCGAGGGCGGCGGCCTTTGCCCGGCGACACAATCGGGAATTTCGGGGAAAACTGCCGCTTCGCACCCCGGGAAAGGGGCTGG
AAAGAGTGTTTTTTCGAGGCGTTTTCGTTCTAAGTCCTTTTGCAGCGAGGAGTTCGGTCCGGAACTTATTGTCCAA (SEQ ID
NO: 512)

### Example 8—Functional Validation of Engineered CLUST.089537 CRISPR-Cas Systems (FIGS. 19-21)

[0280] Having identified the minimal components of CLUST.089537 CRISPR-Cas systems, we selected one loci for functional validation, from the metagenomic source designated CAAACX010000652.

### DNA Synthesis and Effector Library Cloning

[0281] To test the activity of an exemplary CLUST.089537 CRISPR-Cas system, we designed and synthesized systems containing the pET28a(+) vector. Briefly, E. coli codon-optimized nucleic acid sequences encoding the CLUST.089537 CAAACX010000652 effector (amino acid sequence provided in Table 12) were synthesized (Genscript) and cloned into a custom expression system derived from the pET-28a(+) (EMD-Millipore). The vector included a nucleic acid encoding CLUST.089537 CAAACX010000652 effector protein under the control of a lac promoter and an E. coli ribosome binding sequence. The vector also included an acceptor site for a CRISPR array library driven by a J23119 promoter following the open reading frame for the CLUST.089537 CAAACX010000652 effector.

[0282] We computationally designed an oligonucleotide library synthesis (OLS) pool containing “repeat-spacer-repeat” sequences, where “repeat” represents the consensus direct repeat sequence found in the CRISPR array associated with the effector, and “spacer” represents sequences tiling the pACYC184 plasmid as well as E. coli essential genes. The spacer length was determined by the mode of the spacer lengths found in the endogenous CRISPR array. The repeat-spacer-repeat sequence was appended with restriction sites enabling the bi-directional cloning of the fragment into the aforementioned CRISPR array library acceptor site, as well as unique PCR priming sites to enable specific amplification of a specific repeat-spacer-repeat library from a larger pool.

[0283] We next cloned the repeat-spacer-repeat library into the plasmid using the Golden Gate assembly method. Briefly, we first amplified each repeat-spacer-repeat from the OLS pool (Agilent Genomics) using unique PCR primers, and pre-linearized the plasmid backbone using BsaI to reduce potential background. Both DNA fragments were purified with Ampure XP (Beckman Coulter) prior to addition to Golden Gate Assembly Master Mix (New England Biolabs) and incubated per the manufacturer's instructions. We further purified and concentrated the Golden Gate reaction to enable maximum transformation efficiency in the subsequent steps of the bacterial screen.

[0284] The plasmid library containing the distinct repeat-spacer-repeat elements and Cas proteins was electroporated into E. Cloni electrocompetent E. coli (Lucigen) using a Gene Pulser Xcell® (Bio-rad) following the protocol recommended by Lucigen. The library was either co-transformed with purified pACYC184 plasmid, or directly transformed into pACYC184-containing E. Cloni electrocompetent E. coli (Lucigen), plated onto agar containing chloramphenicol (Fisher), tetracycline (Alfa Aesar), and kanamycin (Alfa Aesar) in BioAssay® dishes (Thermo Fisher), and incubated for 10-12 hours at 37° C. After estimation of approximate colony count to ensure sufficient library representation on the bacterial plate, the bacteria were harvested and plasmid DNA extracted using a QIAprep Spin Miniprep® Kit (Qiagen) to create an “output library.” By performing a PCR using custom primers containing barcodes and sites compatible with Illumina sequencing chemistry, we generated a barcoded next generation sequencing library from both the pre-transformation “input library” and the post-harvest “output library,” which were then pooled and loaded onto a Nextseq 550 (Illumina) to evaluate the effectors. At least two independent biological replicates were performed for each screen to ensure consistency.

### Bacterial Screen Sequencing Analysis

[0285] Next generation sequencing data for screen input and output libraries were demultiplexed using Illumina bcl2fastq. Reads in resulting fastq files for each sample contained the CRISPR array elements for the screening plasmid library. The direct repeat sequence of the CRISPR array was used to determine the array orientation, and the spacer sequence was mapped to the source (pACYC184 or E. Cloni) or negative control sequence (GFP) to determine the corresponding target. For each sample, the total number of reads for each unique array element (rₐ) in a given plasmid library was counted and normalized as follows: (rₐ+1)/total reads for all library array elements. The depletion score was calculated by dividing normalized output reads for a given array element by normalized input reads.

[0286] To identify specific parameters resulting in enzymatic activity and bacterial cell death, we used next generation sequencing (NGS) to quantify and compare the representation of individual CRISPR arrays (i.e., repeat-spacer-repeat) in the PCR product of the input and output plasmid libraries. We defined the array depletion ratio as the normalized output read count divided by the normalized input read count. An array was considered to be “strongly depleted” if the depletion ratio was less than 0.1 (more than 10-fold depletion). When calculating the array depletion ratio across biological replicates, we took the maximum depletion ratio value for a given CRISPR array across all experiments (i.e. a strongly depleted array must be strongly depleted in all biological replicates). We generated a matrix including array depletion ratios and the following features for each spacer target: target strand, transcript targeting, ORI targeting, target sequence motifs, flanking sequence motifs, and target secondary structure. We investigated the degree to which different features in this matrix explained target depletion for CLUST.089537 systems, thereby yielding a broad survey of functional parameters within a single screen.

[0287] FIG. 19 shows the degree of interference activity of the engineered compositions by plotting for a given target the normalized ratio of sequencing reads in the screen output versus the screen input. The results are plotted for each DR transcriptional orientation. In the functional screen for each composition, an active effector complexed with an active RNA guide will interfere with the ability of the pACYC184 to confer E. coli resistance to chloramphenicol and tetracycline, resulting in cell death and depletion of the spacer element within the pool. Comparing the results of deep sequencing the initial DNA library (screen input) versus the surviving transformed E. coli (screen output) suggest specific target sequences and DR transcriptional orientation that enable an active, programmable CRISPR system. The screen also indicates that the effector complex is only active with one orientation of the DR.

[0288] FIGS. 20A-B depict the location of strongly depleted targets for CLUST.089537 CAAACX010000652 effector targeting pACYC184 and E. coli E. Cloni essential genes.

[0289] FIG. 21 depicts a weblogo of the sequences flanking depleted target, indicating a 5′ PAM of TTC.

### OTHER EMBODIMENTS

[0290] It is to be understood that while the invention has been described in conjunction with the detailed description thereof, the foregoing description is intended to illustrate and not limit the scope of the invention, which is defined by the scope of the appended claims. Other aspects, advantages, and modifications are within the scope of the following claims.

What is claimed is:

1. An engineered, non-naturally occurring Clustered Regularly Interspaced Short Palindromic Repeat (CRISPR)-Cas system of CLUST.121143, CLUST.196682, or CLUST.089537, comprising:
an RNA guide comprising a direct repeat sequence and a spacer sequence capable of hybridizing to a target nucleic acid; and
a CRISPR-associated protein or a nucleic acid encoding the CRISPR-associated protein, wherein the CRISPR-associated protein comprises an amino acid sequence that is at least 80% (e.g., 81%, 82%, 83%, 84%, 85%, 86%, 87%, 88%, 89%, 90%, 91%, 92%, 93%, 94%, 95%, 96%, 97%, 98%, 99% or 100%) identical to an amino acid sequence provided in Table 2, Table 8, or Table 12;
wherein the CRISPR-associated protein is capable of binding to the RNA guide and of targeting the target nucleic acid sequence complementary to the spacer sequence.

2. The system of claim 1, wherein the system is the CRISPR-Cas system of CLUST.121143 and the CRISPR-associated protein comprises an amino acid sequence that is at least 80% (e.g., 81%, 82%, 83%, 84%, 85%, 86%, 87%, 88%, 89%, 90%, 91%, 92%, 93%, 94%, 95%, 96%, 97%, 98%, 99% or 100%) identical to an amino acid sequence provided in Table 2.

3. The system of claim 2, wherein the CRISPR-associated protein is a CLUST.121143 3300014839 effector protein.

4. The system of claim 2 or 3, wherein the CRISPR-associated protein is capable of recognizing a protospacer adjacent motif (PAM), and the target nucleic acid comprises a PAM comprising the nucleic acid sequence 5′-TTG-3′.

5. The system of any one of claims 2-4, wherein the direct repeat sequence comprises a nucleotide sequence that is at least 80% (e.g., 81%, 82%, 83%, 84%, 85%, 86%, 87%, 88%, 89%, 90%, 91%, 92%, 93%, 94%, 95%, 96%, 97%, 98%, 99% or 100%) identical to a nucleotide sequence provided in Table 3.

6. The system of any one of claims 2-5, wherein the spacer sequence of the RNA guide comprises between about 22 nucleotides to about 40 nucleotides.

7. The system of any one of claims 2-6, wherein the spacer sequence of the RNA guide comprises between about 26 nucleotides to about 35 nucleotides.

8. The system of claim 1, wherein the system is the CRISPR-Cas system of CLUST.196682 and the CRISPR-associated protein comprises an amino acid sequence that is at least 80% (e.g., 81%, 82%, 83%, 84%, 85%, 86%, 87%, 88%, 89%, 90%, 91%, 92%, 93%, 94%, 95%, 96%, 97%, 98%, 99% or 100%) identical to an amino acid sequence provided in Table 8.

9. The system of claim 8, wherein the CRISPR-associated protein is a CLUST.196682 3300025638 effector protein.

10. The system of claims 8 or 9, wherein the CRISPR-associated protein is capable of recognizing a protospacer adjacent motif (PAM), and the target nucleic acid comprises a PAM comprising the nucleic acid sequence 5′-CG-3′.

11. The system of any one of claims 8-10, wherein the direct repeat sequence comprises a nucleotide sequence that is at least 80% ((e.g., 81%, 82%, 83%, 84%, 85%, 86%, 87%, 88%, 89%, 90%, 91%, 92%, 93%, 94%, 95%, 96%, 97%, 98%, 99% or 100%) identical to a nucleotide sequence provided in Table 9.

12. The system of any one of claims 8-11, wherein the spacer sequence of the RNA guide comprises between about 17 nucleotides to about 44 nucleotides.

13. The system of any one of claims 8-12, wherein the spacer sequence of the RNA guide comprises between 26 and 38 nucleotides.

14. The system of claim 1, wherein the system is the CRISPR-Cas system of CLUST.089537 and the CRISPR-associated protein comprises an amino acid sequence that is at least 80% (e.g., 81%, 82%, 83%, 84%, 85%, 86%, 87%, 88%, 89%, 90%, 91%, 92%, 93%, 94%, 95%, 96%, 97%, 98%, 99% or 100%) identical to an amino acid sequence provided in Table 12.

15. The system of claim 14, wherein the CRISPR-associated protein is a CLUST.089537 CAAACX010000652 effector protein.

16. The system of claim 14 or 15, wherein the CRISPR-associated protein is capable of recognizing a protospacer adjacent motif (PAM), and the target nucleic acid comprises a PAM comprising the nucleic acid sequence 5′-TTC-3′.

17. The system of any one of claims 14-16, wherein the direct repeat sequence comprises a nucleotide sequence that is at least 80% ((e.g., 81%, 82%, 83%, 84%, 85%, 86%, 87%, 88%, 89%, 90%, 91%, 92%, 93%, 94%, 95%, 96%, 97%, 98%, 99% or 100%) identical to a nucleotide sequence provided in Table 13.

18. The system of any one of claims 14-17, wherein the spacer sequence of the RNA guide comprises between about 20 nucleotides to about 40 nucleotides.

19. The system of any one of claims 14-18, wherein the spacer sequence of the RNA guide comprises between 25 and 37 nucleotides.

20. The system of any one of claims 1-19, wherein the CRISPR-associated protein comprises at least one (e.g., one, two, or three) RuvC domain.

21. The system of any one of claims 1-20, wherein the CRISPR-associated protein comprises a split RuvC domain.

22. The system of any one of claims 1-21, wherein the CRISPR-associated protein comprises a catalytic residue (e.g., aspartic acid or glutamic acid).

23. The system of any one of claims 1-22, wherein the CRISPR-associated protein cleaves the target nucleic acid.

24. The system of any one of claims 1-23, wherein the CRISPR-associated protein further comprises a peptide tag, a fluorescent protein, a base-editing domain, a DNA methylation domain, a histone residue modification domain, a localization factor, a transcription modification factor, a light-gated control factor, a chemically inducible factor, or a chromatin visualization factor.

25. The system of any one of claims 1-24, wherein the nucleic acid encoding the CRISPR-associated protein is codon-optimized for expression in a cell.

26. The system of any one of claims 1-25, wherein the nucleic acid encoding the CRISPR-associated protein is operably linked to a promoter.

27. The system of any one of claims 1-26, wherein the nucleic acid encoding the CRISPR-associated protein is in a vector.

28. The system of claim 27, wherein the vector comprises a retroviral vector, a lentiviral vector, a phage vector, an adenoviral vector, an adeno-associated vector, or a herpes simplex vector.

29. The system of any one of claims 1-28, wherein the target nucleic acid is a DNA.

30. The system of any one of claims 1-29, wherein the target nucleic acid comprises a PAM.

31. The system of any one of claims 1-30, wherein the CRISPR associated protein has non-specific nuclease activity.

32. The system of any one of claims 1-31, wherein the targeting of the target nucleic acid by the CRISPR-associated protein and RNA guide results in a modification in the target nucleic acid.

33. The system of claim 32, wherein the modification in the target nucleic acid is a double-stranded cleavage event.

34. The system of claim 32, wherein the modification in the target nucleic acid is a single-stranded cleavage event.

35. The system of claim 32, wherein the modification in the target nucleic acid results in an insertion event.

36. The system of claim 32, wherein the modification in the target nucleic acid results in a deletion event.

37. The system of any one of claims 32-36, wherein the modification results in cell toxicity or cell death.

38. The system of any one of claims 1-37, further comprising a donor template nucleic acid.

39. The system of claim 38, wherein the donor template nucleic acid is a DNA.

40. The system of claim 38, wherein the donor template nucleic acid is an RNA.

41. The system of any one of claims 1-40, wherein the RNA guide comprises a tracrRNA, a modulator RNA, or both.

42. The system of any one of claims 1-41, wherein the system further comprises a tracrRNA.

43. The system of any one of claims 1-42, wherein the system further comprises a modulator RNA.

44. The system of any one of claims 1-43, wherein the system is present in a delivery composition comprising a nanoparticle, a liposome, an exosome, a microvesicle, or a gene-gun.

45. The system of any one of claims 1-43, which is within a cell.

46. The system of claim 45, wherein the cell is a eukaryotic cell.

47. The system of claim 45, wherein the cell is a prokaryotic cell.

48. A method of binding the system of any one of claims 1-47 to the target nucleic acid in a cell comprising:
(a) providing the system; and
(b) delivering the system to the cell,
wherein the cell comprises the target nucleic acid, wherein the CRISPR-associated protein binds to the RNA guide, and wherein the spacer sequence binds to the target nucleic acid.

49. A method of editing a target nucleic acid, the method comprising contacting the target nucleic acid with a system of any one of claims 1-47.

The application's sequence listing, which the Patent Office published only in electronic form, follows.

SEQUENCE LISTING (834 sequences)

SEQ ID NO: 1 - protein, 878 aa, Unknown
  Description of Unknown: aquatic-freshwater sequence
MNHKSTVKASVRHLTRHALQKPGEESDPGETTKTLKFRVDAKGHTRTRLDQIFTAQRQFVRDLLNKLEGMWDKDPQRFIRMVESSASDPFESKTSCYGWMMTKFLTGSDLPEHLSRSAATASVATLSGNMKSFVTRRENVLKDMAVVIERNMENCEAGLKDLCAELKIDRFKSPPSVDLESINAKTVEKYNEWVAAARVWCNLILAQKHKIPRGDAFFPTRLKAYPGFPGSVIHKEATSFATAIKELRKCLADLKQSHQKLFGALSNEEWSLVLERFPAPEGTGGKGMRHQLGKTLAVLGKKHPEWKPRQYIEELVAGLERGADSMAKHLENRQFSDRPAAIKLINLLNNACVVLMEPLRVKSLYKEYFEQDTPRRNAFGQARGSLAEPTDQADSLQILGFSLMDEVRGICRYDGFLAFAGDKEKDQWAFFFDPDGPGGMGIADPVKHPKGSTDSGYIGFGTMGGSRKRAQAAEKRLVRERLWIRRDRKPLQLPLHFGTRQGREYLWNFDHGLKKSSDPWMLTNGRLLRIYPPNRPQFSDYFLTITLQKDTPPLAISSGEKLVGVDRGEQNPASFAVVDAKGRLLERGNVGEKYTAKIRQFAEMKSDLQRTAGGYTRKLRAKERNTASALGGLVMRELLDLLVRHPGALVFERLSSGITTRGGRGTLMGNMHYERILSGVEGKLAEAGCYKAPSAAKYRKGITPFLRFVNPAYTSATCSACGEVFSSSWYKKTAATISKESPGSWSVTLPNGKKLQLPCSYTSYMRGRGEKTWNTAERLEELFKDRTWSDLPPSTRKTVEGLVARLTHHRPKRGEFVCPSCGHKDDADLQAALNIARKSIWVSSLPPRQAKQSEGEDRRSTEEPWRVWYKKQIMEKWS

SEQ ID NO: 2 - protein, 877 aa, Unknown
  Description of Unknown: aquatic-freshwater sequence
MIHKSTVKASVRHLTRHALDKPGEGDPGETTKTLKFRIDAKGHTRTRLDQIFSAQRQFVRDLLNKLEGMWDKDPERFIRMARSSPSEPFEKKTSCAGWMLTKFLTGSDLPKHLSRQSARATLSPLSRNMKSFITRRKNVLKDMAVVIGRNRDNWDSGLKELCAELKVDQFKGPPSVDPDKLNAKTVEKYNEWVAAARVWCNLILAQKHKIPRGDAFFPTRLKAYPGFPGSVIHKEAVPFSTAIEELRKCLADLKRSQLKLFDGLTAEEWVLVLERFPATEGEGGKGMRHQLGKTLAVLGKKHSDWKPRQLVEELVAGLERGADSLVNHLKDRDFSDRPAAIKLINLLNNACVVLMEPLRVKNLYREYFEQDTPRRNAFGQARGSLAEPTDQADSLEIEGFSLKKGDAGSCNFDGLLAVTPKDGKDQWSFFFDPEGPGGMGIAEITKHPRGSTTTEHLSFGSSGGSRKKAQASEKKLVRERLWIRRDRKPLQLPLQFGTRQGREYLWNFDHGLKKSSDPWLLANGRLLRVYPINRPQFSQYNLTITLQKDTPPLALSAGEMLIGVDRGEVNPASFAVVDAKGKLLKCGNVGEKYTAKIRQLAEMKSDLQRTAGGYTRKLRAKERNTASALGGLVIRELLDLLVRHPGDLVFERLTSGITTRGGRGTLMGNMHYERIMSGVEGKLAEAGCYKVPRATKFRSKDTRFVRFVHPAYTSATCSACGDVFSSGWYKKTAATIAKESPGSWSVTLPSGKKIQLPSSYTYYMRGRGEKTWNTAERLEELFKGRKWSDLPPSTRKTVEGLVARLIHHRPKRGEFVCPSCGHKDDADLQAALNIARKSIWVRSLPPRQAKQSEGEDRRSTEEPWREWYKKQIREKWA

SEQ ID NO: 3 - protein, 877 aa, Unknown
  Description of Unknown: aquatic-freshwater sequence
MIHKSTVKASVRHLTRHALDKPGEGDPGETTKTLKFRIDAKDHTRTRLDQIFNAQRQFVRDLLNKLEGMWDKDPERFIRMVRSSASEPFEKKTSCAGWMLTKFLTGSDLPEHLSRSSATASVATLSGNMKSFITRRENVLKDMAVVIERNRENWDSGLKELCAELKIDQFKAPPSVDPDKLNAKTVEKYNEWVAAARVWCNLILAQKHKIPRGDAFFPTRLKAYPGFPGSVIHKEGIAFDTAIKELRKCLADLKRSHLKLFDGLTVEEWGLVLERFPAPEGEGGKGMRHQLGKTLAVLGKKHSDWKPRQLAEELVTGLERGADSLANHLKDRDFSDRPAAIKLINLLNNACVVLMEPLRVKNLYREYFEQDTPRRNAFGQARGSLAEPTDQADSLQIMGFAIRKTPEGHSGFDGFLAVSQKEGKDIWSFFFDPDGPGGMGLCDASKHPRGSTTTDQIGFGTSGGSRKRAQAAEKRLVRERLWIRRDRKPLQLPLQFGTRQGREYLWNFDHGLKKSSDPWMLTNGRLLRIYPPNRPQFSQYYLTIALQKDTPPPALTAGEMLIGVDRGEQNPASYAVTDGKGKLLAKGNVGESYSAKIRQFAEMKSEMQRTAGGYTRKLRAKERNTASALGGLVIRELLDLLVRHPGALVFERLTSGITTRGGRGTLMGNMHYERILSGVEGKLAEAGCYKAPSAAKYRKGITPFLRFVNPAYTSATCSACGDVFSSGWYRKAAATISRESSGSWSVTLPSGKKVQLPSSYTSYMRGRGEKTWNTAERLEELFKGRKWSDLPPSTRKTVDGLVARLIHHRPKRGEFVCPSCAHKDDADLQAALNIARKSIWVSSLPHRQAKQSEGEDRRSTEEPWREWYKKRIREKWA

SEQ ID NO: 4 - protein, 867 aa, Unknown
  Description of Unknown: aquatic-freshwater sequence
MIHKSTVKASVRHLTRHALDKPGEGDPGKPTTKTLKFRIDAKGHTRTRLDQIFTAQNHFRRDLYIKLEGMWDKDPESFISMVNSSPSKPFQKKTSCSGWIETKFVTGVALPEHLSRETAAATAVAVGNSLTATFERRKNVISQLAKNIEENRSVWRGNLKELCSELKITPFKAPPSIHPAKINAKTVEKYNEWVAAARIWCNLILVQKHRVPRNSACLPVRLKHYPGFPGSVIFKKGASLATAIKEFRKCLAGLKRSQLKLFDGLTAEEWGLVIDRFPAPEGEGGKGMRHQLGKTLAVLGKKHPDWKPRQLVEELVAGLERGADSLVNHLKDRDFSDRPAAIKLINLLNNACVVLMEPLRVKNLYRELFEVGTPRRDAFGQARGALAEPTDQSEGLEIRGFSIRTNRPPIGHSSFNGFLAVRQTEGKDEWSFFFDPDGPGGMGLSGLPPAGSIPTDYIGFGSTGGSRKKAQASEKKLVRERLWIRRDRNPLQLPLQFGKRQGREYLWNFDHGLKKSSDPWMLANGRLLRVYPPNQPQFSDYFLTITLQKDTPPLALSAGEMLIGVDQGEVNPASYAVTDAKGKLLTRGNVGESYSAKIRQFAEMKSAEQRTAGGYTRKLRSKERNTASACGGLVIRELLDLLVRYPGALVFERLSSGIATRGGRGTLMSNMHYQRITGGIEKKLSEAGCHRITDFKSNFSPFLRMVQPHYTSATCSNCGEVFDSDWYEKLTATIRKSVSGSWVVTLPDGKELWLQGREEIPWNPTDRLEEIFKGRTFPDLTSRSQKIVQGIVGRLVAFRPKRGEFVCPCCGHTDDADLQAALNIARKSIWLSTLPKRSKKETLAEARGSTKPAWKKWYQNRISENWC

SEQ ID NO: 5 - protein, 878 aa, Unknown
  Description of Unknown: aquatic-freshwater sequence
MNHKSTVKASVRHLTRHALQKPGEESDPGETTKTLKFRVDAKGHTRTRLDQIFTAQRQFVRDLLNKLEGMWDKDPQRFIRMVESSASDPFESKTSCYGWMMTKFLTGSDLPEHLSRSAATASVATLSGNMKSFVTRRENVLKDMAVVIERNMENCEAGLKDLCAELKIDRFKSPPSVDLESINAKTVEKYNEWVAAARVWCNLILAQKHKIPRGDAFFPTRLKAYPGFPGSVIHKEATSFATAIKELRKCLADLKQSHQKLFGALSNEEWSLGLERFPAPEGTGGKGMRHQLGKTLAVLGKKHPEWKPRQYIEELVAGLERGADSMAKHLENRQFSDRPAAIKLINLLNNACVVLMEPLRVKSLYKEYFEQDTPRRNAFGQARGSLAEPTDQADSLQILGFSLMDEVRGICRYDGFLAFAGDKEKDQWAFFFDPDGPGGMGIADPVKHPKGSTDSGYIGFGTMGGSRKRAQAAEKRLVRERLWIRRDRKPLQLPLHFGTRQGREYLWNFDHGLKKSSDPWMLTNGRLLRIYPPNRPQFSDYFLTITLQKDTPPLAISSGEKLVGVDRGEQNPASFAVVDAKGRLLERGNVGEKYTAKIRQFAEMKSDLQRTAGGYTRKLRAKERNTASALGGLVMRELLDLLVRHPGALVFERLSSGITTRGGRGTLMGNMHYERILSGVEGKLAEAGCYKAPSAAKYRKGITPFLRFVNPAYTSATCSACGEVFSSSWYKKTAATISKESPGSWSVTLPNGKKLQLPCSYTSYMRGRGEKTWNTAERLEELFKDRTWSDLPPSTRKTVEGLVARLTHHRPKRGEFVCPSCGHKDDADLQAALNIARKSIWVSSLPPRQAKQSEGEDRRSTEEPWRVWYKKQIMEKWS

SEQ ID NO: 6 - protein, 878 aa, Unknown
  Description of Unknown: aquatic-freshwater sequence
MNHKSTVKASVRHLTRHALQKPGEESDPGETTKTLKFRVDAKGHTRTRLDQIFTAQRQFVRDLLNKLEGMWDKDPQRFIRMVESSASDPFESKTSCYGWMMTKFLTGSDLPEHLSRSAATASVATLSGNMKSFVTRRENVLKDMAVVIERNMENCEAGLKDLCAELKIDRFKSPPSVDLESINAKTVEKYNEWVAAARVWCNLILAQKHKIPRGDAFFPTRLKAYPGFPGSVIHKEATSFATAIKELRKCLADLKQSHQKLFGALSNEEWGLVLERFPAPEGTGGKGMRHQLGKTLAVLGKKHPEWKPRQYIEELVAGLERGADSMAKHLENRQFSDRPAAIKLINLLNNACVVLMEPLRVKSLYKEYFEQDTPRRNAFGQARGSLAEPTDQADSLQILGFSLMDEVRGICRYDGFLAFAGDKEKDQWAFFFDPDGPGGMGIADPVKHPKGSTDSGYIGFGTMGGSRKRAQAAEKRLVRERLWIRRDRKPLQLPLHFGTRQGREYLWNFDHGLKKSSDPWMLTNGRLPRIYPPNRPQFSDYFLTITLQKDTPPLAISSGEKLVGVDRGEQNPASFAVVDAKGRLLERGNVGEKYTAKIRQFAEMKSDLQRTAGGYTRKLRAKERNTASALGGLVMRELLDLLVRHPGALVFERLSSGITTRGGRGTLMGNMHYERILSGVEGKLAEAGCYKAPSAAKYRKGITPFLRFVNPAYTSATCSACGEVFSSSWYKKTAATISKESPGSWSVTLPNGKKLQLPCSYTSYMRGRGEKTWNTAERLEELFKDRTWSDLPPSTRKTVEGLVARLTHHRPKRGEFVCPSCGHKDDADLQAALNIARKSIWVSSLPPRQAKQSEGEDRRSTEEPWRVWYKKQIMEKWS

SEQ ID NO: 7 - protein, 878 aa, Unknown
  Description of Unknown: aquatic-freshwater sequence
MNHKSTVKASVRHLTRHALQKPGEESDPGETTKTLKFRVDAKGHTRTRLDQIFTAQRQFVRDLLNKLEGMWDKDPQRFIRMVESSASDPFESKTSCYGWMMTKFLTGSDLPEHLSRSAATASVATLSGNMKSFVTRRENVLKDMAVVIERNMENCEAGLKDLCAESKIDRFKSPPSVDLESINAKTVEKYNEWVAAARVWCNLILAQKHKIPRGDAFFPTRLKAYPGFPGSVIHKEATSFATAIKELRKCLADLKQSHQKLFGALSNEEWSLVLERFPAPEGTGGKGMRHQLGKTLAVLGKKHPEWKPRQYIEELVAGLERGADSMAKHLENRQFSDRPAAIKLINLLNNACVVLMEPLRVKSLYKEYFEQDTPRRNAFGQARGSLAEPTDQADSLQILGFSLMDEVRGICRYDGFLAFAGDKEKDQWAFFFDPDGPGGMGIADPVKHPKGSTDSGYIGFGTMGGSRKRAQAAEKRLVRERLWIRRDRKPLQLPLHFGTRQGREYLWNFDHGLKKSSDPWMLTNGRLLRIYPPNRPQFSDYFLTITLQKDTPPLAISSGEKLVGVDRGEQNPASFAVVDAKGRLLERGNVGEKYTAKIRQFAEMKSDLQRTAGGYTRKLRAKERNTASALGGLVMRELLDLLVRHPGALVFERLSSGITTRGGRGTLMGNMHYERILSGVEGKLAEAGCYKAPSAAKYRKGITPFLRFVNPAYTSATCSACGEVFSSSWYKKTAATISKESPGSWSVTLPNGKKLQLPCSYTSYMRGRGEKTWNTAERLEELFKDRTWSDLPPSTRKTVEGLVARLTHHRPKRGEFVCPSCGHKDDADLQAALNIARKSIWVSSLPPRQAKQSEGEDRRSTEEPWRVWYKKQIMEKWS

SEQ ID NO: 8 - protein, 708 aa, Unknown
  Description of Unknown: aquatic-freshwater sequence
MNHKSTVKASVRHLTRHALQKPGEESDPGETTKTLKFRVDAKGHTRTRLDQIFTAQRQFVRDLLNKLEGMWDKDPQRFIRMVESSASDPFESKTSCYGWMMTKFLTGSDLPEHLSRSAATASVATLSGNMKSFVTRRENVLKDMAVVIERNMENCEAGLKDLCAELKIDRFKSPPSVDLESINAKTVEKYNEWVAAARVWCNLILAQKHKIPRGDAFFPTRLKAYPGFPGSVIHKEATYFATAIKELRKCLADLKQSHQKLFGALSNEEWSLVLERFPAPEGTGGKGMRHQLGKTLAVLGKKHPEWKPRQYIEELVAGLERGADSMAKHLENRQFSDRPAAIKLINLLNNACVVLMEPLRVKSLYKEYFEQDTPRRNAFGQARGSLAEPTDQADSLQILGFSLMDEVRGICRYDGFLAFAGDKEKDQWAFFFDPDGPGGMGIADPVKHPKGSTDSGYIGFGTMGGSRKRAQAAEKRLVRERLWIRRDRKPLQLPLHFGTRQGREYLWNFDHGLKKSSDPWMLTNGRLLRIYPHNRPQFSDYFLTITLQKDTPPLAISSGEKLVGVDRGEQNPASFAVVDAKGRLLERGNVGEKYTAKIRQFAEMKSDLQRTAGGYTRKLRAKERNTASALGGLVMRELLDLLVRHPGALVFERLSSGITTRGGRGTLMGNMHYERILSGLRASWPRQVATRHPVPPSTAKESRRSCDL

SEQ ID NO: 9 - protein, 885 aa, Unknown
  Description of Unknown: aquatic-freshwater sequence
MLNPAEMQMPSNSIKSIKASVRELYNHALNKQGDGEPGETTKTLKFKIDPSPENQIQLTKIFDAQRAFLRDVLQKLEGMWDKHPEKIEEMANCSGSKPFEKKTSCYGWLLTKFLTGSDLPENLSRSAATASIGTLAGNLKSFLTRRKNVLKEMANTVSANAKLWDEDLPIKCKEMDLDLFKAPPKIKVESLNAKTVDEYNEWVASARVWCNLILVQKNKVPRSDACFPKRLKAYPGFPFSVKHKETAKITDAVKSLQDCLCELKKAHLKAFDSLTEVEWQSVLERFPSPKEVDGKGTRRLIGKTLAALHKKNPNWKPVDIVKELIAGMERSIQSLVKHLEVREFTDRKAAIKLMNHMNHACVFLLEPLRVRNDYKGLYEKDTPRRNAFGEARGSLSEPTDEADSLQIIGFSLNERGGTRYDGILAYSGEPGSQKWAFFFDPLGPEGMGLADEGKNPARTTLLPWVGFGTTGGARKKAQAKAKALVRGKIWVSPKRKPMALPLLFGARQGREYLWNFDRGLKSSSTPWMLTNGRILRIFPYQKPELAEFYLTLTLQKDNPPLALSLGEHLIGVDRGEENPASYALVDAKGRLVERGHIGQEYSQRIKTFAKEKAELQRSLGGYTRRLRAKERNIASALGGQVIRELMNLLVAKKGALVFENLSSGIVTRGGRGTLMGNMHYERILSGIEQKLAEAGCYEVPNAKKYRKGVSPFVRFVNPSYTSSTCSKCGEVYSRAWYEKIAPSLERKGAGIWAVKLGEKHFTLPLSYSYFLRGRGEQHKKTDERLTEILKGKDWAKLSATSKKEIVGLLQSKLVAYRPKRGKFNCPSCEHEDDADLQAALNIARKTIWVSTLPPKKAKSGDQDFRGVGQELWAKWYKDRVHKNWA

SEQ ID NO: 10 - protein, 878 aa, Unknown
  Description of Unknown: aquatic-freshwater sequence
MNHKNTVKASVRELTRHALQKPGEESEPGETTKTLKFRVDAKGHTRTRLDQIFTAQRQFVRDLLTKLEGMWDKDPQRFIRMVESSASDPFESKTSCYGWMMTKFLTGSDLPEHLSRSAATASVATLSGNMKSFVTRRENVLKDMAVVIERNMENCEAGLKDLCAELKIDRFKSPPSVDLESINAKTVEKYNEWVAAARVWCNLILAQKHKIPRGDAFFPTRLKAYPGFPGSVIHKEATSFATAIKELRKCLADLKQSHQKLFDALSTEEWSLVLEKFPAPEGTGGKGMRHQLGKTLAVLGKKHPEWKPRQYIEELVAGLERGADSMAKHLKNRQFSDRPAAIKLINLLNNACVVLMEPLRVKSLYKEYFEQDTPRRNAFGQARGSLAEPTDQADSLQILGFSLMDEVRGVCRYDGFLAFTGDKGKDQWAFFFDPDGPGGMGIADPVKHPKGSSDSGYIGFGTMGGSRKRAQAAEKRLVRERLWIRRDRKPLQLPLHFGTRQGREYLWNFDHGLKKSSDPWMLTNGRLLRVYPPNRPQLSDYFLTITLQKDTPPLAISSGDKLVGVDRGEQNPASFAVVDDKGRLLERGNVGEKYTAKIRQFAEMKSDLQRTAGGYTRKLRAKERNTASALGGLVMRELLDLLVRHPGALVFERLSSGITTRGGRGTLMGNMHYERILSGVEGKLAEAGCYKAPSAAKYRKGITPFLRFVNPAYTSATCSACGEVFSSGWYKKTAATISKESLGSWSVTLPNGKKLQLPSSYTSYMRGRGEKTWNTAERLEELFQDRTWSDLPPSTRKTVEGLVARLTHHRPKRGEFVCSSCGHKDDADLQAALNIARKSIWVSSLPPRQAKQSEGEDRRSTEEPWRVWYKKQIMGKWS

SEQ ID NO: 11 - protein, 878 aa, Unknown
  Description of Unknown: aquatic-freshwater sequence
MNHKNTVKASVRELTRHALQKPGEESEPGETTKTLKFRVDAKGHTRTRLDQIFTAQRQFVRDLLTKLEGMWDKDPQRFIRMVESSASDPFESKTSCYGWMMTKFLTGSDLPEHLSRSAATASVATLSGNMKSFVTRRENVLKDMAVVIERNMESFEAGLKDLCAELKIDRFKSPPSVDLESINAKTVEKYNEWVAAARVWCNLILAQKHKIPRGDAFFPTRLKAYPGFPGSVIHKEATSFATAIKELRKCLADLKQSHQKLFDALSTEEWSLVLEKFPAPEGTGGKGMRHQLGKTLAVLGKKHPEWKPRQYIEELVAGLERGADSMAKHLKNRQFSDRPAAIKLINLLNNACVVLMEPLRVKSLYKEYFEQDTPRRNAFGQARGSLAEPTDQADSLQILGFSLMDEVRGVCRYDGFLAFTGDKGKDQWAFFFDPDGPGGMGIADPVKHPKGSSDSGYIGFGTMGGSRKRAQAAEKRLVRERLWIRRDRKPLQLPLHFGTRQGREYLWNFDHGLKKSSDPWMLTNGRLLRVYPPNRPQLSDYFLTITLQKDTPPLAISSGDKLVGVDRGEQNPASFAVVDDKGRLLERGNVGEKYTAKIRQFAEMKSDLQRTAGGYTRKLRAKERNTASALGGLVMRELLDLLVRHPGALVFERLSSGITTRGGRGTLMGNMHYERILSGVEGKLAEAGCYKAPSAAKYRKGITPFLRFVNPAYTSATCSACGEVFSSGWYKKTAATISKESLGSWSVTLPNGKKLQLPSSYTSYMRGRGEKTWNTAERLEELFQDRTWSDLPPSTRKTVEGLVARLTHHRPKRGEFVCSSCGHKDDADLQAALNIARKSIWVSSLPPRQAKQSEGEDRRSTEEPWRVWYKKQIMGKWS

SEQ ID NO: 12 - protein, 951 aa, Unknown
  Description of Unknown: aquatic-freshwater-bog sequence
MPQTIELKLFMNSIHKSVRSLLSLGLSRSASASPQTITRTVKFKINTDIRPELIPVLNRHFDAFEKFRRKVLDELEAWWNKKPDDFTSMVRATAKERFQDKSSCYGWLYRHFLSGKDLPAGLTREAANSVLWSLKGGLKSFLTRRENVAKELEENYTTNANLWNESIIRIIRDHKLDKPTPPTAPPTVNFKKLTDDQIEKYNGWVGIVRMWGNLILHQQLVQKGLVDREDAKLPRRLKGYPGFPGSQRYLQGASLADSLKRLDDITGKFAKDSEKRFAKITSEHWGAVLERFFPPEAKEDETRRRPRTVKQMAAERLHYLCKHNPDWKPEQTAKEVLAGLFRLADKLHAHLKNNSPHDRRAVIKLANVLNVAAVFSLEPLRASGDYIACFEADEPRRQAFADLRGALAQPGDDTVAIEVTGFSLSSNSPQYCGLLACREIKPDCDEWAFFYTLDNQDLKIFAKPGPRPPRDFQPTNWHGFATKGSDDEKEIVRGTVWLPTEISKTKPALALPLAFGARQGREYLWHFDRDLRTRNEWTPLNARLLRVMPAAQESESEKERALRANRADFYVTITFLRLAPPIASVKSKELIGVDRGEVVPAAFAVVGATGRFLAKPSRLREFMEYLRQLDNWEKLNLAHPENARENERKPRWEARPDDGFGFIAPEYRDQQREFNKLKRELQQTKGGYTRWLRAKERNRARALGGQVMRELLMLCATHKAPLVFESLGSGLATRGGKGTMMSQMQYSRVFTSVEQKLAEAGLCAIARQPKFRKWDNGFIKLVGPACTSATCSVCGQVHSTSFYATIAATLKESSKGNWQVTLPNGKVRRLPKEYGYWLRGKGEQTANTDERIHQLLNKPFAELSTTNHNALISLLKSRWLPFRPDQATFQCLACGYSVNADVQAALNIARKHLFRIGREKKSDEENEAARRKVMGEWETWYRQKLASVWNK

SEQ ID NO: 13 - protein, 1000 aa, Unknown
  Description of Unknown: aquatic-freshwater-bog sequence
MGLGRTFCLGHNLARSTKRREKEDECGNFRGWQNHVGFRLGHRLRIARRMPQTIELKLFMNSIHKSVRSLLSLGLSRSASASPQTITRTVKFKINTDIRPELIPVLNRHFDAFEKFRRKVLDELEAWWNKKPDDFTSMVRATAKERFQDKSSCYGWLYRHFLSGKDLPAGLTREAANSVLWSLKGGLKSFLTRRENVAKELEENYTTNANLWNESIIRIIRDHKLDKPTPPTAPPTVNFKKLTDDQIEKYNGWVGIVRMWGNLILHQQLVQKGLVDREDAKLPRRLKGYPGFPGSQRYLQGASLADSLKRLDDITGKFAKDSEKRFAKITSEHWGAVLERFFPPEAKEDETRRRPRTVKQMAAERLHYLCKHNPDWKPEQTAKEVLAGLFRLADKLHAHLKNNSPHDRRAVIKLANVLNVAAVFSLEPLRASGDYIACFEADEPRRQAFADLRGALAQPGDDTVAIEVTGFSLSSNSPQYCGLLACREIKPDCDEWAFFYTLDNQDLKIFAKPGPRPPRDFQPTNWHGFATKGSDDEKEIVRGTVWLPTEISKTKPALALPLAFGARQGREYLWHFDRDLRTRNEWTPLNARLLRVMPAAQESESEKERALRANRADFYVTITFLRLAPPIASVKSKELIGVDRGEVVPAAFAVVGATGRFLAKPSRLREFMEYLRQLDNWEKLNLAHPENARENERKPRWEARPDDGFGFIAPEYRDQQREFNKLKRELQQTKGGYTRWLRAKERNRARALGGQVMRELLMLCATHKAPLVFESLGSGLATRGGKGTMMSQMQYSRVFTSVEQKLAEAGLCAIARQPKFRKWDNGFIKLVGPACTSATCSVCGQVHSTSFYATIAATLKESSKGNWQVTLPNGKVRRLPKEYGYWLRGKGEQTANTDERIHQLLNKPFAELSTTNHNALISLLKSRWLPFRPDQATFQCLACGYSVNADVQAALNIARKHLFRIGREKKSDEENEAARRKVMGEWETWYRQKLASVWNK

SEQ ID NO: 14 - protein, 878 aa, Unknown
  Description of Unknown: aquatic-freshwater-freshwater and sediment sequence
MNHKSTVKASVRHLTRHALQKPGEESDPGETTKTLKFRVDAKAHTRTRLDQIFTAQRQFVRDLLNKLEGMWDKDPQRFIRMVESSASDPFESKTSCYGWMMTKFLTGSDLPEHLSRSAATASVATLSGNMKSFVTRRENVLKDMAVVIERNMENCEAGLKDLCAELKIDRFKSPPSVDLESINAKTVEKYNEWVAAARVWCNLILAQKHKIPRGDAFFPTRLKAYPGFPGSVIHKEATSFATAIKELRKCLADLKQSHQKLFDALSNEEWSLVLERFPAPEGTGGKGMRHQLGKTLAVLGKKHPEWKPRQFIEELVAGLERGADSMAKHLENRQFSDRPAAIKLINLLNNACVVLMEPLRVKSLYKEYFEQDTPRRNAFGQARGSLAEPTDQADSLQILGFSLMDEVRGICRYDGFLAFAGDKGKDQWAFFFDPDGPGGMGIADPVKHPKGSSDSGYIGFGTMGGSRKRAQAAEKRLVRERLWIRRDRKPLQLPLHFGTRQGREYLWNFDHGLKKSSDPWMLTNGRLLRIYPPNRPQFSDYFLTITLQKDTPPLAISSGEKLVGVDRGEQNPASFAVVDAKGRLLERGNVGEKYTAKIRQFAEMKSDLQRTAGGYTRKLRAKERNTASALGGLVMRELLDLLVRHPGALVFERLSSGITTRGGRGTLMGNMHYERILSGVEGKLAEAGCYKAPSAAKYRKGITPFLRFVNPAYTSATCSACGEVFSSSWYKKTAATISKESPGSWSVTLPNGKKLQLPCSYTSYMRGRGEKTWNTAERLEELFKDRTWSDLPPSTRKTVEGLVARLTHHRPKRGEFVCPSCGHKDDADLQAALNIARKSIWVSSLPPRQAKQSEGEDRRSTEEPWRVWYKKQIMEKWS

SEQ ID NO: 15 - protein, 941 aa, Unknown
  Description of Unknown: aquatic-freshwater-peatland sequence
MKAKYRSNSIHASLRQLLELGLSKSSSAEPQKITRTAKFKINTDIRPDLVPVLNRHFDAFEKFRRKVLDELEARWNKDQKSFQAMVQCSAKEPYQKKSSCYAWLDTHFITEAKAVLDLPRKPATSLLYNLSGGLKGFLTRRETVTEDIQKRFNDNLREWNGDLSQLASDLKAPLPPAPPNLDFENLTERAIERYNDWVGRTRAWCNLILVQQKKVERRDACLPRYLKGYPGFFGSQRYATTASLAENLKKLEQEAREQSKKAPTRFAKLSPEIWTAIQERFSPPEGHEAGEKRRPRTAHQTVCLRFAALRAAHPEWTPAQLAGEILAGIFHGTEKLKKHLAANGFEDRRAVIKLANLYNVVVAFSLDPIRAAGNYISFYKEETPKRNAFGDVRGGLHQPSDESAAIEIMGFGLQKESGKPLYNGLLVCKKSEKEHDDSWAFLYCHTEGQMFELANEKAKLRGKLLTDWTGFASRGGSRKKAEASAKQLVRGRVWISEKTPPTVMPLAFGSRQGREYLWHFDRDLREKNEWVLGNGRLLRIMPPGRPNAADFYLTITLERQAPPVAEFIASKLIGIDRGEAVPAAYALIDREGRWLVNQKRFQEFLKALGTWHDELDEWWKKNKNTPINDRVKRPRLQWTSELEDGFGFVASEYREQQADFNDQKRELQRTQGGYTRWLRSKERNRARALGGEVTRAVLSLASEHRSPLVLEKLGSALATRGGKGTMMSQMQYERMLTTLEQKLAEVGLYAMPSAPKYRKLTNGFINFAAPHYTSSTCSSCGQVHDSIFYNELAKKIVRPNDSKWQVTLPSGQTRTLPQTYSYWLKGKGEQTKQTNERLNELLGERTVTQLSKSSYMTLVSLLKNSWLPYRPQQADFCCLNCGYTTNADVQGALNIARKFLFRSERGKKTDDAGEEGEAKRGKYKDDWQTWYRQKLEKVWCK

SEQ ID NO: 16 - protein, 887 aa, Unknown
  Description of Unknown: soil metagenome sequence
MSKEPRKNSTHASLRQLLELGLSKSSSAEPQKITRTVKFKIHTLARPELVAPLNKHFNAFDQFREKVLAELESWWDKDPDSFTHMVKCSTKLKFEEKSSCYAWLYKKFLTGAELPPELSRDAANAMLDNLGGGLKSFLTRRATVSLEIKKRYEQNKEEWEKELSLIAKERNLKLPEVPREIDFNNLTAKKIDFYNEWVGLVRMWCNLILIQKEKLTRENACLPRYLKSYPGFPGSQRFRKPVTIEQTLAELETIAREQAGKASQRFADLKPEVWQAIQERFSPPKKEEAETTPRPRTASQTVSRRFTALIQANPNWKPQQIAEEILAGIFRAADKLKKHLVTTKYTDRRATIKFANLFNVAVVFAREPFRARGDYVASYEADIARQKAFGDLRGALHQPSDESSAIQISGFSIKDGGTPNYNGLLVCKSEANGKDSWAFLYCHQEGQIFQLADEKAKLRGKKLSEWTGFASRGGSRKKAEASPKQLVKSSVWVSEKNPPTVLPLAFGTRLGREYLWHFDRNLRTKSEWVLGNGRLLRVMPPGRTDLAEFYLAITMERETPPVASVVANKLIGIDRGEAVPASYAVVDGEERLLDSGRIAENYREEQRAFNKSKRELQSERGGYTRTLRSKERNRARALGGEVTRKLLSLAAEHCAPLVLENLNSSLATRGGKNTMMSQMQYERVFTALEQKLAEAGLYSLPSAPKFRKGDNAFIKLVGPAYTSQTCSACGHVHWAEFYEKILDTLAPCGEKQWQVTVEGKARTLPESYTYWLRGKGEQTKNTHERIIELLKDRPVSKLNKTDRKSLVSLFKNRWMPYRPKQADFQCVVCGHKMNADEQGALNIARKFLFASGRGKKSGEMTEAERRKVRGEWEKWYKEKLATVWKKQ

SEQ ID NO: 17 - protein, 888 aa, Unknown
  Description of Unknown: terrestrial-soil-fen sequence
MSKEYRPDSIHASLRHLLELGLSKTGSSEPQKITRTVKFKVHTLARPELVAPLNQHFNAFDEFRHKVLADLESWWDKAPDSFTRMVKSSTKAKYEEKSSCYAWLYRKYLTGAELPTELSRDAANAMLDNLAGSLKSFLTRRATVSLEIKKRYEQNREEWEKELSLVAKEKNLTLPKPPPEIDFDHLNVMAIGLYNEWVGLVRMWCNLILIQKEKLTRENACLPRYLKSYPGFPGSQRFRKPVTIEQTFGELEAAARDQAGNATNRFANVKPEVWQAIEERFKPPAKDEVEIEARPRSRTASQTVARRLAALVKANPNWTPDQLAVEILAGIFRAADKLQKHLAATEYTDHRATIKLANLFNAAVVFAREPFRASGDYVASYGADMARQKAFGDLRGALHQPSDESSAIQITGFSVNEDGSPNYNGLLVCKPEADGKDSWAFLYCHQEGQTFQLADEKAKLRGKKLSEWTGFASRGGSRKKAEASAKQLVKGRVWVSEKKPPTVLPLAFGTRMGREYLWHFDRNLRTKSAWVLGNGRLLRVMPPARPDLAEFYLTITMEREAPPVASVVANKLIGIDRGEAVPAAYAVVDSEGRLLDSGRIAEKYREEQRAFNKSKRELQSERGGYTRTLRSKERNRARALGGEVTRRLLSLAAEHRAPLVLENLNSSLATRGGKNTMMSQMQYERVFTALEQKLAEAGLYSLPSAPKYRKGDNAFIKLVGPAYTSQTCSACGHVHSSEFYDQLTDTLAPCGDKQWRVTVEGKPRILPESYTYWLRGKGDQTRNTNERIVELLKDRPISKLTKTDRKSLVSLVKNRWMQYRPTQADFQCVVCGHKMNADEQGALNIARKFLFALGRGKKSGEMTEAERRKVRGEWEKWYKEKLGTVWRK

SEQ ID NO: 18-100 - skipped (83 entries)

SEQ ID NO: 101 - DNA, 36 bp, Artificial Sequence
  Description of Artificial Sequence: Synthetic oligonucleotide
ggtttgctgacctcgattgttggaggagtgcaaaag

SEQ ID NO: 102 - DNA, 37 bp, Artificial Sequence
  Description of Artificial Sequence: Synthetic oligonucleotide
ggtttcgcactccctcattgttggtggtgtgcaaaag

SEQ ID NO: 103 - DNA, 36 bp, Artificial Sequence
  Description of Artificial Sequence: Synthetic oligonucleotide
ggtttgctccggtccttgttggtaggtgtgcaaaag

SEQ ID NO: 104 - DNA, 36 bp, Artificial Sequence
  Description of Artificial Sequence: Synthetic oligonucleotide
ggttagctcccatccttgttgggtggtttgcaaaag

SEQ ID NO: 105 - DNA, 27 bp, Artificial Sequence
  Description of Artificial Sequence: Synthetic oligonucleotide
ttgcctcctgtggggttgtatgtgaag

SEQ ID NO: 106 - DNA, 36 bp, Artificial Sequence
  Description of Artificial Sequence: Synthetic oligonucleotide
ggtttgctgacctcgattgttggaggtgtgcaaaag

SEQ ID NO: 107 - DNA, 37 bp, Artificial Sequence
  Description of Artificial Sequence: Synthetic oligonucleotide
gtgagaaccgctgcggttcgcggggatggtttcaaag

SEQ ID NO: 108 - DNA, 37 bp, Artificial Sequence
  Description of Artificial Sequence: Synthetic oligonucleotide
ttcggaatcgctgacgctcgcggggctggtttcaaag

SEQ ID NO: 109 - DNA, 36 bp, Artificial Sequence
  Description of Artificial Sequence: Synthetic oligonucleotide
gtttgcatgatgacgtttgcggggttggtttcaaag

SEQ ID NO: 110 - DNA, 37 bp, Artificial Sequence
  Description of Artificial Sequence: Synthetic oligonucleotide
ctctgacgcgctgacgttcgcggggttggtttcaaag

SEQ ID NO: 111-199 - skipped (89 entries)

SEQ ID NO: 200 - DNA, 7 bp, Artificial Sequence
  Description of Artificial Sequence: Synthetic oligonucleotide
ccgcgag

SEQ ID NO: 201 - DNA, 307 bp, Artificial Sequence
  Description of Artificial Sequence: Synthetic polynucleotide
tgttccgttccgaacgaggcaaaaagactgacgacgcaggcgaagaaggtgaggcaaagcgtggtaaatacaaagacgactggcagacttggtatcgccaaaagttggaaaaggtctggtgcaagtaatctgacatcgcccattcgagacccgcgagcatgacatggagaccgacgatttccttcctatctactcgctcgcggagtggcattattgcccgcgctcgtcttttctgtcgtggtttggtgcagagcgtgaggatcgcgtcaccccggcttaccagaaaatgcgcgaagtccacgcggtg

SEQ ID NO: 202 - DNA, 792 bp, Unknown
  Description of Unknown: aquatic-freshwater sequence
cacaatatttcttaaatgtcgagaaaataatattttacacctatccatatgccaaattacaaaaatgaatgttttacctcataaagagtaaaaagtgctcccccgtcacaaaacattagtttggtgactggttgtttttaaccaccaacttctctgtccaatttattggggttttgtgaatccctattccaaggaccgtttttgtactaccccctaatttacagttatccttattatgaactggaatagctcccttaaaagtccgattataactgcttgcttaatacgatgaatcacaaaaataccgttaaagctcctgttcgcgaacttacccggcatgcattgcagaaacccggggaggagagtgaaccgggagaaacaacaaagactcttaagttccgtgtggatgccaagggacatacccgaacccgactcgaccaggcagcactgaacattgctcggaaaagcatctgggtcagttcccttccaccccgtcaggcaaagcaatcggaaggtgaagaccggcgttccaccgaggaaccatggcgcgtttggtacaagaagcagatcatgggaaagtggtcttaaaaaatcccttgccacccggctatcataggatcaaattaaccccttagtattttctttgcacaacgtcgactgccctgccaaggagcggctgataaccaacaagttcttttacatttgaggtgcaaaccgttcttgtgatttttttataaaaggatgcacccgaaagggttggctatacccacatactgcccgcttgcattatgt

SEQ ID NO: 203 - DNA, 944 bp, Unknown
  Description of Unknown: aquatic-freshwater sequence
gtctactttcacggcaacgtgaaagacttggaacccaaacccggttcggtcacaccgatccagaaaacggccgcggggctgatgtttcttgtcgatgcgatcatgctgggactcgctctttatttgatccttcgctaacgcgaaccgatcgataaggattaagtcgcactacccctgcatcgattcccgttttttcgattcccttccaggtatttaatttttacttctcaacgaggtatttggcttggcatagtctcctctgcgccccctgccccctgtcccctgccccctttcacttccagcctaccaattcccagtgttcaaaacgtcggtgttttggcgtttatcctttcctgagataacgcccaggactgtttttgtcccacctcctaatttacacttatccttattatgaactggaatagctccgttaaaagtccgattatgactgcttgcttaatacgatgaatcacaaaagcactgtcaaagcctctgttcgccatcttactcggcatgcattgcagaaacccggggaggagagtgatccgggagaaacgacaaagactttaaagttccgggtagatgccaaaggacatacccgaacccgactcgaccaggcagcactgaacattgcccgcaaaagcatctgggtcagctcccttccaccccgtcaggcaaagcaatcggaaggtgaagaccggcgttccaccgaggaaccatggcgcgtttggtacaaaaagcagatcatggaaaagtggtcttaaaaaatcccttgccacccggctatcataggatcattttagtctcttagtattttctttgcacaacgtcgactgccctgccaaggagcggctgacaaccaacaagttcttttacatttgaggtgcaaaccgttcttgtgatttttttacaaaaggatgcacccgaaagggttggccataccc

SEQ ID NO: 204 - DNA, 934 bp, Unknown
  Description of Unknown: aquatic-freshwater sequence
acggcaacgtgaaagacttggaacccaaacccggttcggtcacaccgatccagaaaacggccgcggggctgatgtttcttgtcgatgcgatcatgctgggactcgctctttatttgatccttcgctaacgcgaaccgatcgataaggattaagtcgcactacccctgcatcgattcccgttttttcgattcccttccaggtatttaatttttacttctcaacgaggtatttggcttggcatggtcttctctgcgccccctgccccctgtcccctgccccctttcacttccagcctaccaattcccagtgttcaaaacgtcggtgttttggcgtttatcctttcctgagataacgcccaggactgtttttgtcccacctcctaatttacacttatccttattatgaactggaatagctccgttaaaagtccgattatgactgcttgcttaatacgatgaatcacaaaagcactgtcaaagcctctgttcgccatcttactcggcatgcattgcagaaacccggggaggagagtgatccgggagaaacgacaaagactttaaagttccgggtagatgccaaaggacatacccgaacccgactcgaccaggcagcactgaacattgcccgcaaaagcatctgggtcagctcccttccaccccgtcaggcaaagcaatcggaaggtgaagaccggcgttccaccgaggaaccatggcgcgtttggtacaaaaagcagatcatggaaaagtggtcttaaaaaatcccttgccacccggctatcataggatcattttagtctcttagtattttctttgcacaacgtcgactgccctgccaaggagcggctgacaaccaacaagttcttttacatttgaggtgcaaaccgttcttgtgatttttttacaaaaggatgcacccgaaagggttggccataccc

SEQ ID NO: 205 - DNA, 2207 bp, Unknown
  Description of Unknown: aquatic-freshwater sequence
tcaaaaccagccgtagctggcggaaaatatgcttgggattgtcattggtatgtggccaattcctttcccacacggcgtgcttgtccacaggattttaaccctgcctgtttttttgatatcaaacctgatatcggtcatttctcctcgatactctgaaaccaatcagaaacacccttcccaggatgctgagttaagaaccacacgctaacttatcgtttggctgaaagggatttgaacccttttcttattatattgctgaatacagagaaattctaagaaatcttaaaatatattttacctgcaaacagcacaaagcactaatagccagttatatgcacacctagtaggattgaatcttattaatacaacctaggacagcaaatgacccaccatatgagttattattgtggaatgaagaattaccaaacttgtggaaagtcgatatctggggatacgatcaatgcttaatccagctgaaatgcaaatgccctcaaatagtataaaatcgatcaaaacttcagtacgagagctgtacaaccacgccttgaacaaacagggcgatggtgagccaggagagacaaccaagacacttaagttcaagatcgatccacaagcggcgctgaacattgccaggaagacgatctgggtcagtaccctacctcctaaaaaagccaagagcggtgatcaggactttcgtggtgtaggacaagagctgtgggcgaaatggtacaaggatagggttcacaaaaactgggcataaaatagcacttgtctgaattgggatgggttaatacattgaaatcttagtatttactttgcatagcgttgccaaccttgcccaaggatgagtcaacgccccatagaaggcagttcattaacacgcaaaaggcacaccgccgtagtaagtagggggcagcaaccacagatggtgagatgcctcctatggggtcatatgtgaagttcatgttgtctcccatcttggacccatagccgttggtgagttgcctcctgtggggccatatgtgaaggaggccaattctgctcgattgtgatccaatgtgatggtgagttgcctcctgtggggttgtatgtgaaggtcaatgtggagcgattgctgggggtattcagttggtgatttgcctcctatggggctatgtgtgaagggatgcgatcctgcaacattcaagcctagtcagttgcaagcgttttctgcaaatgatagagatctgttggtggtttgccttctgtggggctatgtgtgaaggatgtcgaagcgccattgctcggcattgatgcgtgtgtgatctggtttctgtggagttatgtgtgaaggctcgctctcatagttctttggcttggcactcatagcacttttccgtttaaaccagcaaaaaatcgccgcactagataatgcaacataatttgtataaattatccaaataaatgcctgttttctcaacacaagaaaaacagcctatcctttcatacttatctgtttctctctgtgcatcaattaaatatataataggatcttaatcgtataatagcttaatccagagtaacctcctattagaaatccgctgctctagtcccctgagctacgggcgcagcacgtagttttgtagcagaaaattgtcagagaggcagggattatggtggagtaagaagggggttaagggatgatgggattaaggggaaatctgaaaaaggggttaagggattcaggggttaaggaattaaggaagagacaaatcgatgactgacaagacgtttaaggttttttaggacggaggaggaggccgaggtcggggagcttgagcagtttggcgacaaggaagtaggcgagtgacccgagaagaacgagcgcaaaggttccaccgatacgaacagggatgggttggcccatgggttgaatgaattggaggcctataagtagggctccaattaaggtgacgcagcagagaagtatctttccgactccttggaggaagtgaggttcgaagtagctgcctacgtgccgttgggaggcccacaccagctgcagaatattcagcgtcgccacagaggctgtggtgagagtgagtcctaaaatgccgaggttgtagacccgaataagaatgtagttgaaggtgaggttgagaaaaattcccgtaaggctaacgcgaagcggaatccccgggcgatcgatagccgagaaggcgggggcg

SEQ ID NO: 206 - DNA, 737 bp, Unknown
  Description of Unknown: aquatic-freshwater sequence
cctcataaagagtaaaaagtgctcccccgtcacaaaacattagtttggtgactggttgtttttaaccaccaacttctctgtccaatttattggggttttgtgaatccctattccaaggaccgtttttgtactaccccctaatttacagttatccttattatgaactggaatagctcccttaaaagtccgattataactgcttgcttaatacgatgaatcacaaaaataccgttagagcttctgttcgcgaacttacccggcatgcattgcagaaacccggggaggagagtgaaccgggagaaacaacaaagactcttaagttccgtgtggatgccaagggacatacccgaacccgactcgaccaggcagcactgaacattgctcggaaaagcatctgggtcagttcccttccaccccgtcaggcaaagcaatcggaaggtgaagaccggcgttccaccgaggaaccatggcgcgtttggtacaagaagcagatcatgggaaagtggtcttaaaaaatcccttgccacccggctatcataggatcaaattaaccccttagtattttctttgcacaacgtcgactgccctgccaaggagcggctgataaccaacaagttcttttacatttgaggtgcaaaccgttcttgtgatttttttataaaaggatgcacccgaaagggttggctatacccaaggattcccagccacccatctgacggactggtttgctgacctcg

SEQ ID NO: 207 - DNA, 1191 bp, Unknown
  Description of Unknown: terrestrial-soil-fen sequence
tgccgggcggcggggaaagcgtatgatttgcgccgtcaccagaaaacaaacgaaggcacaaaatggggcggaaaagaaaaggcatcgggcagaaagagcaagcccagccggatttgggtccggccgggcttgtccaagaaacgcttttgaacaggtgtatccgcatggaggataagtccatattcagcttcccttgcttgaccactttactttacaacacttcgaatttatgagcaaagaataccgaccggattcgattcacgcctcgcttcgccatctgcttgaacttggcttgagcaaaaccggttcgagtgaaccgcaaaagatcacgcgcacagttaagttcaaggtacacacgcttgcccgaccggaactggtgcaaggcgcattgaacatcgcccgcaagttccttttcgccttgggacgcgggaagaaatccggcgagatgaccgaagcggagcggcgcaaagtcaggggcgagtgggaaaaatggtataaggaaaaactcggaaccgtttggagaaagtgataagtctggattttcgcccattgcgggcctgatatggaaaacgatgattttctgcccatctactcgctggcggaatggcattattgcccgcgctcggcgtttctctcctggttcggcgctgaacgcgaagaccgcgtgacgccggcttaccagaagatgcgtgaagtccatgccgtgagcaaccatgtggccttccgcggcgaactcgaacggggcggttggctgggcggaaaaaacgcgctgctcatttacccgcttcacgatgacgaccttgaaaatgtggagcggttcggggcggtgcgcgtctggcaggccacatttgaacttctttaagaaaacgcttgcgtctgtcctgctaatggcgtaaaaaggccccgttagtatttactttgatacgatctggcgtgcctttccgcccaacggattcgacacgacccacgaacttcagcgtgtctgaggaaacctcaagcggtggatgagccgctgcttgtcgcgatccttgataagtcaaacggagcgagtcggttaggtttggaaaaagccttgaaccgttctcagcggtttcctatgcgtaacttgcctaaaatcaacacgagtttgcgcgttagccgctgcgacagcagcggctcacgcgcaaactcgtgtgatccaagggccgaaga

SEQ ID NO: 208 - DNA, 947 bp, Unknown
  Description of Unknown: aquatic-freshwater-peatland sequence
gcgcatcgccgagttcggcttcttgggcgtgcgcgtcatgacctgaatgcacaccccgcgtcgaaacggcgagccttccaaggctggcgacttggacttgtatttaactttgcgtcggccctggcggaccagttgattgatagtcggcattgcgtcttaaaaatggaacggggaatataacaaaccaaatccggcttgcaacaactatttcgcccgatttgcggtcttaactcatcgtagcggcggtcggcagaccgccgcatttcttctggaaattgcgctgtccggcactttgccgggagccgctgcgcccgttttgcagaagtctcgttttaatccttttggaaagcaccgcgaagccagcttcaactaccgcttgccgccgccgggacacgggcgtagcatcactccacaatcagccatcaggaaaatgggtatgaaaatctctttggggatttcatcatgaaagcaaagtatcggtctaactcaattcatgcctcgctccggcagcttttggagcttggcttaagcaagagcagttcggcagaaccacagaaaatcacgcgcactgccaagttcaagattaataccgacatccggccggatttggttttaaacattgcccgaaagtttttgttccgttccgaacgaggcaaaaagactgacgacgcaggcgaagaaggtgaggcaaagcgtggtaaatacaaagacgactggcagacttggtatcgccaaaagttggaaaaggtctggtgcaagtaatctgacatcgcccattcgggacccgcgagcatgacatggagactgacgatttccttcctatctactcgctcgcggagtggcattattgcccgcgctcgtcttttctgtcgtggtttggtgcagagcgtgaggatcgcgtcaccccggcttaccagaaaatgcgcgaagtccacgcggtgagcaat

SEQ ID NO: 209 - DNA, 856 bp, Unknown
  Description of Unknown: aquatic-freshwater-freshwater and sediment sequence
aaacccaacggcataaagaggatcaggagttttgggtgcccttattatgagataaagaataagaataccccatacgatattcatccatttaagcagacgttgcacttgggatattctgtcacctgcgttgaccatttggcaacgtgccattatcgatgacaagggagaggtatacccccaaatggatatgcctgttataaaacattagtttggtgacttggcatttttagccactttttccctgtccaattttagggggttttgtgaatccctattccaaggactgtttttgtcccacctcctaatttacagttatccttattatgaactggaatagctccgttaaaggtccgattatgacttcttgcttaatacgatgaatcacaaaagcaccgtcaaggcttctgttcgccatcttacccggcatgcattgcagaaacccggggaggagagtgatccgggagaaacgacaaagactttaaagttccgggtagatgccaaagcacatacccgaacccgactcgaccaggcagcactgaacattgcccgcaaaagcatctgggtcagctcccttccaccccgtcaggcaaagcaatcggaaggtgaagaccggcgttccaccgaggaaccatggcgcgtttggtacaaaaagcagatcatggaaaagtggtcttaaaaaatcccttgccacccggctatcataggatcattttagtctcttagtattttctttgcacaacgtcgactgccctgccaaggagcggctgacaaccaacaagttcttttacatttgaggtgcaaaccgttcttgtgatttttttacaaaaggatgcacccgaaagggttggccataccc

SEQ ID NO: 210 - DNA, 823 bp, Unknown
  Description of Unknown: soil metagenome sequence
ctgaaattcccggccatcaatcccgccaacgccgccgagcgcgatgaatttcgtctgaataccttcccaccggacaaccacaccgcgcccgcgccgccgactccgcccgcgacaccgaagccgtaaaatcaaatttggaaaacgcaaagcggcctttgggaatggaggccgctttttgttttggattgttcctgttcacgaaatccgctattcaggctacaaatctaaaagggtaaatatgagcaaagagcctcggaaaaattcgactcacgcctcgcttcgccagttgcttgaacttggtttgagcaaaagcagttcggcagagccacagaagatcacgcgcacggtgaagttcaagattcacacgcttgcacgaccggaactcgttggcgcgttgaacatcgcccgcaaattcctgttcgcctcgggacgcggaaaaaagtccggtgaaatgaccgaagccgagcggcgcaaagtgcggggcgagtgggaaaagtggtataaggaaaaacttgcgaccgtctggaaaaaacaatgaaaggcttgcgtcagttctgcgaaaggcgtaaacaggcggcgttagtatttactttgatacgatctagcgtgcctttccgtccaacggattcgacacgacccgtgaacttcagcgtgcaaaaggaaatcacaagtggtggttgaccgctgcctgtagcgatccttgaaaacttaaaccgagcgaatcagttaggttcggaaagaagcccgaactggtttcaaagtcaatcgcgtcaatgatttcctgcaaaccataaacgggtctaaacgggtcagtcctaacttt

SEQ ID NO: 211 - DNA, 1177 bp, Unknown
  Description of Unknown: aquatic-freshwater sequence
tgccccagcccctaactcaagttctgtaaaaacattattcgaaagaataaatccccgatcagaggattgcccaacaatagtgccttggttgtttatatcgtaacaggcgctccacgtatgggcggaactaagcacccccacggaactcatgcttttatttctgtacacgaaccccctgtcaccaagcgaacttgaggaggcaccaaccacaacacccgagtcgttaatgctgtagcttcgactggaattattcgtgtaggtgtactcgcctccgaaccacgatgtccaagtaacaacctgaggaccaagagtcctaagatttaccagcttgtaagtcggggcttgcgcatttccgttttcgcaaattacgagcgaagcaattaaaacgcagagccaccgaaccatatgattattcaacacctattttactttttttcaactagggaaaaccggctttttaactactatcccttttgtcctaagcattaacttttgcctcagaaactgtcctgatcactaaactaatggtttgtgaccggctgtgttttgggcgttccgactctgtgggtttcattggggttttgtgactgccccctcctaataccgtatttgtaccaccccctaccttagggttggccctgttttgaactggaatacgtaccttaatcgtctgattataacccttcggttaaaacgatgattcataagagtaccgttaaagcatcggttcgccacctgacccgccatgcgttggacaaacccggcgagggcgacccgggtgaaacaacaaaaaccctaaagttccggattgatgccaaagatcacacccgcacccggctcgaccagcaggcagccctaaacattgcccgaaaaagcatctgggtcagttccttgccgcaccggcaggcaaaacagtcggagggagaagaccggcgttccactgaggagccgtggcgggagtggtacaagaagcggatctgggagaagtgggcttaaaaaaaagcccttgccacccggtccccgcaggatcattttagtctcttagtattttctttgcacagcgttgactcccctgccaagggtgcggccaacaatccaacaagttctttcgcaacagggggcaaaccccgttcaattttgctttaaggaactaaagcccatggcgttaggtatagct

SEQ ID NO: 212 - DNA, 954 bp, Unknown
  Description of Unknown: aquatic-freshwater sequence
aaatacggttccgtcaaataagttgcctgaagagtcactggcgttccctgaaaattcgtattttccaaccaagccataattgaggttaaccacggcagacttcgctgttgaacccatcaacaagatggctaatgcgaccacccgattcatatattaattaaaccatgttcttttgttttttcaatgtcccacaggctctttttttgactaaataaaatatatcccttttggtatatccttggttggtttcgtattatcgcataaaacaaatggtttgtgaccggtcatgttttgagcgttccatctctgtaggtttcattggggttttgtgattaccccctcctaataccgtatttgtaccaccccctaccttagggttagccctgttttgaactggaatacgtaccttaatcgtctgattataacccttcggttaaaacgatgattcataagagtactgttaaagcatccgttcgccacctgacccgccatgctctggacaaacccggcgagggcgatccgggtaaaccaacaacaaaaaccctgaagttccggattgatgccaaggggcacacccgcacccggctcgaccaagccgctttaaatatagctcgcaagagtatctggctgagtactttgcccaaaagatccaaaaaggaaacactggctgaagcacgtgggtccacaaaaccagcgtggaaaaagtggtatcaaaatcgtatcagcgagaattggtgttaaaaatacttgtcttacactcgaaaatattataaaaagcagtcttagtattttcttagcaacacgttgtctgtcctcgccaaggaacggtcaacaatccaacaagttctttcgcaacgggggggcaaaccagaaaattttcccttaaatttgaatcttaggactttagatactgccatgcgcggatactacaaaaccaaatgcatatttttcgta

SEQ ID NO: 213 - DNA, 995 bp, Unknown
  Description of Unknown: aquatic-freshwater sequence
ggcagggtcaaagtcatcatggcttggaagttggacagaatcggccgctcgacccagcacttggccggaatcatcaatcgactccttaaggcggatgttggcctcgtggttccctctcagggtattgatacctcggccggcagcatgaatcctgccagtaagctccagttgaacgttctggccgcagtcgctgagtttgagagggaccttatccgcgagaggacgaaggccggcatgaaggcagctaaggccagaggcgttaaattcggccgtgaaacggtggtaaccgaagcccagcgaatcctagccaaagagattcttcagcttaatccggatacttcggtgaccagcctgtcaaagcggttgggcttgtctttgggaacggcgagcagacttaagacgattttgggaggtagctgctagtaccgccaatgtcctatccacccgcttacgattgacccagttttgaactggaatacgcaccttaatcgtctgattataacccttcggttaacacgatgattcataagagtaccgttaaagcatcggttcgccacctgacccgccatgctctggacaaacccggcgagggcgatccgggtgaaacaacaaaaaccctgaagttccgcattgatgccaaaggtcacacccgcacccggctcgatcagcaggccgccctgaacatcgctcgtaaaagcatctgggtcagatcattgccgccccgacaggcaaagcagtcggagggcgaggatcggcgttccactgaggagccatggagggagtggtataagaagcagatccgggagaagtgggcttaaaaaaacccttgccacccggtccccctaggatcatcttggtcccttagtattttctttgtacagcgttgactcccctgccaagggtgcggccaacaaccaacaagttttttctcaacgaggggtgttataaccctgaaatttcgacagggtgctgaactgtagggttttggcgataac

SEQ ID NO: 214 - DNA, 1776 bp, Unknown
  Description of Unknown: aquatic-freshwater-bog sequence
caccacgccgtcttcgatggcattgaacaacgtctccagaaacttccgttcccgggccaatcgttggacaaccgtttgcaacccttcggcatccaggcgtccgatcctgcccaggactttatcgagaaaagtcgatattaccgcagccataatgatgatacccgccaatgcgcaaccaccgcgccaatttgacgcacccaaagtattcaagcaattctgattaggcaagcattgctttcaatttgaaaggccggaaaaaaccgtgaaaaattcggggtttttcaattaaacaagaaagttgtcaaggggaaaattgcgcaaaaaaaacagtcaaaatttcggcatttttgacctaagcaattgcaaaccaaacacttacgaatttccacctgcttgctgcccatgactgcaaaatggtagcttgggactgatggacgaatgcgactgatggtctggcaaccagccagtggtcaaggcgggtttctgccagatggacagataggattgtaatcataagacgattcgggcaaaaccagggcggacagggaaagcaggaattggacggtggggcgagattccatcgagccgtaaaatcgagtcggagcacagcccgtcacgttgcaggattaatggtgaaaatgggtcttggcaggacgttctgtttgggccataatcttgcccgctccacaaaacgaagggaaaaagaagatgagtgcggaaacttcagaggctggcaaaaccatgtgggctttcgacttgggcacagactgcgaattgcgcgtcgaatgccgcaaaccatcgaattgaaactatttatggattcaatccacaaatccgttcgttcgctgctatcgcttggcctgtcgcgtagcgcttcggcaagtccgcaaacaattacgcgcacagtaaaattcaagatcaataccgacattcggcaagccgcgctcaatatcgccagaaagcatctgtttcgcattggccgcgaaaaaaaatcagatgaggagaatgaagccgcacgacgcaaagttatgggtgagtgggaaacttggtatcggcagaaactcgccagcgtttggaataaataattcacccttagccattttgactgtgagcgagatatggagatcgacgatttccttccaatctattcgctcgcggagtggcattattgcccacgctcgtcttttctgtcgtggttcggcgcggaacgtgaggatcgcgtcaccccggcttaccagaagatgcgtgaagtccatgccgtgagcaatcatgtggcgtttcggggcgcattggaacgcggcggctggctggatggcaaacacgcgctgctggtttatcccttgcatgatgacgaccttgaaaatgtggaacgttacggcgcggtacgggtgtggcaggcaacgtttgaatttctttgaatttaggcttgcagttggatgggagcaggcataatacttctcccgttagctgtctcctcggaggcagatttactttgattctgtgcgcctttacgccccacgtatttgacgcacttcgcgaacttcagcggttaacggaaaccgccagcggtggatggacgattcacccggcgttccttgacaacacagtccgtagcagttggttatatacgaaacggactaaaagcggtttgccatgcgtaacttgttgccagacaatggagtcatcatctcggcagaaattttgcatttaggtcttgatgcaaatatttggacggcagggcgtgaagacagatcagcatcgcgcttggccaggccc

SEQ ID NO: 215 - DNA, 1440 bp, Unknown
  Description of Unknown: aquatic-freshwater sequence
ctctctggattgggttggtcttcgccacgatggtctactttcacggcaacgtgaaagacttggaacccaaacccggttcggtcacaccgatccagaaaacggccgcggggctgatgtttcttgtcgatgcgatcatgctgggactcgctctttatttgatccttcgctaacgcgaaccgatcgataaggattaagtcgcactacccctgcatcgattcccgttttttcgattcccttccaggtatttaatttttacttctcaacgaggtatttggcttggcatggtcttctctgcgccccctgccccctgtcccctgccccctttcacttccagcctaccaattcccagtgttcaaaacgtcggtgttttggcgtttatcctttcctgagataacgcccaggactgtttttgtcccacctcctaatttacacttatccttattatgaactggaatagctccgttaaaagtccgattatgactgcttgcttaatacgatgaatcacaaaagcactgtcaaagcctctgttcgccatcttactcggcatgcattgcagaaacccggggaggagagtgatccgggagaaacgacaaagactttaaagttccgggtagatgccaaaggacatacccgaacccgactcgacacccggggtggtcggggaacattgatgggcaacatgcactatgagcgaattttgtctgggttgagggcaagttggccgaggcaggttgctacaaggcacccagtgccgccaagtaccgcaaaggaatcacgccgttcttgcgatttgtaaatccagcatataccagtgccacctgttcagcttgtggtgaggtgttcagttctagttggtataagaaaaccgcagccacaatcagtaaggaatcacccggttcatggtcagtgacgcttcccaacggaaaaaaacttcagttgccatgctcctacacctcatacatgcgtgggcgcggtgaaaagacatggaacaccgctgaacggctggaggaacttttcaaggatcgaacatggtcagatcttccccccagcacccgaaaaacagtagagggattggttgctcgcctgactcatcatcgccccaaacggggtcaggcagcactgaacattgcccgcaaaagcatctgggtcagctcccttccaccccgtcaggcaaagcaatcggaaggtgaagaccggcgttccaccgaggaaccatggcgcgtttggtacaaaaagcagatcatggaaaagtggtcttaaaaaatcccttgccacccggctatcataggatcattttagtctcttagtattttctttgcacaacgtcgactgccctgccaaggagcggctgacaaccaacaagttcttttacatttgaggtgcaaaccgttcttgtgatttttttacaaaaggatgcacccgaaagggttggccataccc

SEQ ID NO: 216-300 - skipped (85 entries)

SEQ ID NO: 301 - protein, 674 aa, Unknown
  Description of Unknown: bioreactor metagenome or lab enrichment-defined media-ionic liquid and high solid enriched sequence
MGVKAWKAKIIVADPDLAAALDHTVRQWNLWAEQACIAIMRLRRGDYGDEGQAVWRFLSEKGTFGTSILDKITRVTGRGIKNDEERTIASNFLSRHGPFEPLRAARDALGPNFWYQFQRAVRERIESHDAKLRQWREDHAEWIETRRTWEEEHRAYMNVRPVIEAFEAAEGQSGRRRGRWRRWLDFLSSHPELAAWRGGPATIVPLSKEELAACRRRRRRAVAEQARLFFEKNPELRALNREHDEYQEKFARPWAKRRNPDGFRHRPTFTLPHPDSHPDWPRFKGNAGWRDLSVPDRTVSLELLCPDGSRRWFNVRFVPDPRLASLRPATQPVRQGNTTYHYVSDALGVAEQPVQPQGIKLILRPDGAYLSVSVSVLAPPCGFDVRQSAIEKYGSIWACRKYKQDHPDRPLVTCAVDLAVRHNGALTVARDGEVFARRLLHNRFFLPGDDRERAMNIPSLLEIAAVKRQLRRARRQTGRIAPGKPSCARLQAHYRALCEDRYKKLVAAIFAYARHHGAEVVIFEDLKNLLPNAVNERGVNRALQSWNRGAIVRFARQSAEDVGLRVATVPAFHTSIVCARCGALGCRFEQTREGVRIAKLGPWFGCRACGRRIHADLNASENLHKVLIGTFPQVRRISRDPPVLSIADVRVDQREADRLAAAWLSELSVGPTPF

SEQ ID NO: 302 - protein, 759 aa, Unknown
  Description of Unknown: activated sludge metagenome sequence
MQLWRTHCVFNQRLPALLKRLFAMRRGEVGGNEAQRQVYQRVAQFVLARDAKDSVDLLNAVSLRKRSANSAFKKKATISCNGQAREVTGEEVFAEAVALASKGVFAYDKDDMRAGLPDSLFQPLTRDAVACMRSHEELVKTWEKEYQEWRDRKSEWEAEPEHARYLNLRPKFEEGEAARGGRFRKRAERDHAYLDWLEANPQLAAWRGKAPPAVVPIDEAGKRRIARAKAWKQASVRAEEFWKRNPELHALHKIHVQYLREFVRFKQRPTFTMPDPVHHPRWCLFNAPQTSPQGYRLLRLPQSRRTVGSVELRLLTGPSDGAGFPDAWVNVRFKADPRLAQLRPVKVPRTVTRGKNKGAKVEADGFRYYDDQLLIERDAQVSGLKLLFRDIRMAPFADKPIEDRLLSATPYLVFAVKIKDEARTERAKAIRFDETSELTKSGKKQKSKTLPAGLVSVAVDLDTRGVGFLTRAVIGVPEIQQTHHGVRLLQSRYVAVGQVEARASGEAEWSPGPDLAHIARHKREIRRLRQLRGKPVKGERSHVRLQAHIDRMGEDRFKKAARKIVNEALRGSNPAAGDPYTRADVLLYESLETLLPDAERERGINRALLRWNRAKLIEHLKRMCDDAGIRHFPVSPFGTSQVCSKCGALGRRYSLARENGRAVIRFGWVERLFACPNPECPGRRPDRPDRPFTCNSDHNASVNLHRVFALGDQAVAAFRALPPRDSTARTLAVKRVEDTLRPQLMRLHKLADAGVDSPF

SEQ ID NO: 303 - protein, 759 aa, Unknown
  Description of Unknown: activated sludge metagenome sequence
MQLWRTHCVFNQRLPALLKRLFAMRRGEVGGNEAQRQVYQRVAQFVLARDAKDSVDLLNAVSLRKRSANSAFKKKATISCNGQAREVTGEEVFAEAVALASKGVFAYDKDDMRAGLPDSLFQPLTRDAVACMRSHEELVATWKKEYQEWLDRKSEWEAEPEHALYLNLRPKFEEGEAARGGRFRKRAERDHAYLDWLEANPQLAAWRGKAPPAVVPIDEAGKRRIARAKAWKQASVRAEEFWKRNPELHALHKIHVQYLREFVRFKQRPTFTMPDPVHHPRWCLFNAPQTSPQGYRLLRLPQSRRTVGSVELRLLTGPSDGAGFPDAWVNVRFKADPRLAQLRPVKVPRTVTRGKNKGAKVEADGFRYYDDQLLIERDAQVSGLKLLFRDIRMAPFADKPIEDRLLSATPYLVFAVKIKDEARTERAKAIRFDETSELTKSGKKQKPKTLPAGLVSVAVDLDTRGVGFLTRAVIGVPEIQQTHHGVRLLQSRYVAVGQVEARASGEAEWSPGPDLAHIARHKREIRRLRQLRGKPVKGERSHVRLQAHIDRMGEDRFKKAARKIVNEALRGSNPAAGDPYTRADVLLYESLETLLPDAERERGINRALLRWNRAKLIEHLKRMCDDAGIRHFPVSPFGTSQVCSKCGALGRRYSLARENGRAVIRFGWVERLFACPNPECPGRRPDRPDRPFTCNSDHNASVNLHRVFALGDQAVAAFRALPPRDSTARTLAGKRVEDTLRPQLMRLHKLADAGVDSPF

SEQ ID NO: 304 - protein, 758 aa, Unknown
  Description of Unknown: activated sludge metagenome sequence
MSVRAIQAKVMCDRATLENLWRTHRVFNERVPRILSLLFRMRRGECGKTPAERQLYQRIGQFITNCSAQNADYLMNAVTMRGWKPGSAKKYKIRVKDENGETVEISGESWADEAAALSAKGSILCDKEDLAGDLPGCMRQMLNREAVAIISGHDELVANWSTDHVQWLAEKAKWEREDEHKQYLALRSKFDEFEKSIGGKVGKRRGRWHLYIDWLRANPQLAAWRGGQATVNDLPPDALARIKKAKPWKTRSVEAEEFWKVNPELAALDKLHGYYEREFVRRRKTKRNPDGFDHRPTFTMPDPTNHPRWFVFNAPQTNPAGYADLNLPDNQGDSGSIKLCLLTGEKGDATEYPSDWITAQFRADPRLSRFRRVKVATTVNRGKAKGQAKEKDGYEFFDAHLMQWRPAEISGVKLILRHIKLSGDSSLKSATPYLVFTVSTDDLALTEKARKIEWSDTGHVTKTGKPRKKRTLPDGLVACAIDLGLRHAGFATLALYQDGRPHVLRSRNIWLEPDGRGPELGHIGRHKRKIRKLRRLRGKPVKGEESHIGLQKHITHMGEDRFKKAARGIINFAWNADGTVATKGADPFPRADVILIEKLEGFIPDAEKERGVNRALAAWNRGQLVNRLKELAIDAGYKARIFEILPHGTSQVCSRCGAMGRRYSIARDEESGRPEIRFGWVEKLFACPKCHFSANSDHNASVNLHRKFLLGDAAVAAFFDWKNLPEEKRRGELDAIDEALRGYLRKMHKLQAEIETPF

SEQ ID NO: 305 - protein, 728 aa, Unknown
  Description of Unknown: aquatic-freshwater-freshwater lake or freshwater metagenome sequence
MKLLFKLRRGKIGKNKQQRDDYKRWFEYVIYNGAKNADYNLNALSINNWTPNTAKKYITKLMAGKNKIHAKGLDLVVSRIKSLSDGGILAFDKDKIFIEIPYSFSQLIIRDAVAGISGHDALVKIWKEDHKKWRDEKKSWEDKTENKQYLKLQHIFKQFSDTAGGVGSKKRGRWFTYLCWLSKQSALANWRGNGSFIEPFGEENCGKPSCNKGFKSKLIKESKKFFDANPELFEIHKLHQFYEKNFIRPKAKKHNIDGFEHPPTFTLPDPVRHPIWACYNAPQTNPIGYKDLVLPKKYSGKSAGSFALNLLTGDIIDGKYPKEWVPFKFIADKRLSCFKGKIKVVNNKIRTEYIFEDPHLSKKRQATIGGIKIILKDIKIDNLGHLLSATPYVVFACDVDNEPISEQAKKLKSEDTGETGNSGLPIRKRILPEGCLISCAVDLGIRNLGFATLAESGGIPSECTHGDIKLLRSYNLLLEDGPSLEKIAKQKKLLGKFRRLRGKPIKGEKSHVFLQNHITKMGVDRFNKAARLIVNFALNTEKKKNVQGIEYPRADVIVLENLAGLIPDAAKRKGINKALMNWNRGHLVKRIQEIAHDSGYLYRVYIMSPWGSSQVCCKCKGLGRRYSIIKDENGRQIQFGNGEKLFACANCRYMANADHNASINLHHIFKDKDAVGFYKDYANKNEEEKQKIIDNLEAILRPHLQKMHFTTKKERSLDVPEHPLDVPF

SEQ ID NO: 306 - protein, 762 aa, Unknown
  Description of Unknown: aquatic-freshwater-freshwater lake or freshwater metagenome sequence
MGTRAIKAKIICDKTTLGYLWRSHCMYNQKLSEYMKLLFKLRRGKIGKNKQQRDDYKRWFEYVIYNGAKNADYNLNALSINNWTPNTAKKYITKLMAGKNKIHAKGLDLVVSRIKSLSDGGILAFDKDKIFIEIPYSFSQLIIRDAVAGISGHDALVKIWKEDHKKWRDEKKSWEDKTENKQYLKLQHIFKQFSDTAGGVGSKKRGRWFTYLCWLSKQSALANWRGNGSFIEPFGEENCGKPSCNKGFKSKLIKESKKFFDANPELFEIHKLHQFYEKNFIRPKAKKHNIDGFEHPPTFTLPDPVRHPIWACYNAPQTNPIGYKDLVLPKKYSGKSAGSFALNLLTGDIIDGKYPKEWVPFKFIADKRLSCFKGKIKVVNNKIRTEYIFEDPHLSKKRQATIGGIKIILKDIKIDNLGHLLSATPYVVFACDVDNEPISEQAKKLKSEDTGETGNSGLPIRKRILPEGCLISCAVDLGIRNLGFATLAESGGIPSECTHGDIKLLRSYNLLLEDGPSLEKIAKQKKLLGKFRRLRGKPIKGEKSHVFLQNHITKMGVDRFNKAARLIVNFALNTEKKKNVQGIEYPRADVIVLENLAGLIPDAAKRKGINKALMNWNRGHLVKRIQEIAHDSGYLYRVYIMSPWGSSQVCCKCKGLGRRYSIIKDENGRQIQFGNGEKLFACANCRYMANADHNASINLHHIFKDKDAVGFYKDYANKNEEEKQKIIDNLEAILRPHLQKMHFTTKKERSLDVPEHPLDVPF

SEQ ID NO: 307 - protein, 676 aa, Unknown
  Description of Unknown: aquatic-freshwater-freshwater lake sequence
MVDPEARAALWRTHGVYNECLRFALRHMHKMKRGEADPRYAEIFGAIRNSQHATAVMEAVTDPRWKPKKDPKPWHAPAAALIAEGKLLFDRWKELPGLPGRFHRKLWEGAYQAMDSHKELMAIWASAHEEWQKARAEWEAENPEYMKLRPALEAFEAEHGQAAKRRQRWHKWLAFLQANPGLAAWRGGADVVNPISDDGKERLRRAKRSKRNKVESEEFFNANPELKELDKLHGYYQREFVRPWAKKRNPDGFRHRPTFTEPSPEKHPFWYQFKKGETYKALDLQAGTISLQLLAPEGAKRAALWTTFAFRPDPRLRLIQKVNPPLNEKFTYAFADPAYRGQPARPAEIRGAKLIFRPAQPDGAVYLSFTCDMPDLHCRLSVGQDSIDRYTTKGTKWLVGRLREEPELAGHEPVTCAVDLGLRHLGAATVRRDGKIVRARLLREQGDPGKGPGLPAIAGHKRALAKGRRKRGKPIAGEESFVELQRHTDKMGEDRFKKGARRIVAFAHENGADLIILEKLAGLVPDAEKERGINRALVSWNRANLEKWVKQLANDAGMRVVEVFPHWTSQLCSRCGSMGARFSAKEGLPAFEPVGKLFACPECGYIANADHNASVNLHKRFYGELPEVERPNKDKRVFRLTPRGQPTVEVDMADVEKRILARGRAEDLCRGKPTPF

SEQ ID NO: 308 - protein, 678 aa, Unknown
  Description of Unknown: aquatic-freshwater-freshwater lake sequence
MDMVDPEARAALWRTHGVYNECLRFALRHMHKMKRGEADPRYAEIFGAIRNSQHATAVMEAVTDPRWKPKKDPKPWHAPAAALIAEGKLLFDRWKELPGLPGRFHRKLWEGAYQAMDSHKELMAIWASAHEEWQKARAEWEAENPEYMKLRPALEAFEAEHGQAAKRRQRWHKWLAFLQANPGLAAWRGGADVVNPISDDGKERLRRAKRSKRNKVESEEFFNANPELKELDKLHGYYQREFVRPWAKKRNPDGFRHRPTFTEPSPEKHPFWYQFKKGETYKALDLQAGTISLQLLAPEGAKRAALWTTFAFRPDPRLRLIQKVNPPLNEKFTYAFADPAYRGQPARPAEIRGAKLIFRPAQPDGAVYLSFTCDMPDLHCRLSVGQDSIDRYTTKGTKWLVGRLREEPELAGHEPVTCAVDLGLRHLGAATVRRDGKIVRARLLREQGDPGKGPGLPAIAGHKRALAKGRRKRGKPIAGEESFVELQRHTDKMGEDRFKKGARRIVAFAHENGADLIILEKLAGLVPDAEKERGINRALVSWNRANLEKWVKQLANDAGMRVVEVFPHWTSQLCSRCGSMGARFSAKEGLPAFEPVGKLFACPECGYIANADHNASVNLHKRFYGELPEVERPNKDKRVFRLTPRGQPTVEVDMADVEKRILARGRAEDLCRGKPTPF

SEQ ID NO: 309 - protein, 687 aa, Unknown
  Description of Unknown: aquatic-freshwater-freshwater lake sequence
MSTKAFTARLIVESPEARDALWRTHRLYNECLRFVLRHMHKMKRGEADPRYGEIFGAIRNSQHATAVMEAVTDLRWKPKKDPKPWHTPAAALIAEGKLLFDRWKELPGLPGRFHRKLWEGAYQAMDSHKELMALWVSAHQEWQKARAEWEAENPEYMKVRPALEAFEREHGQAAKRRQRWHKWLAFMRADPRLAAWRGGKALANPISDQGQQRLRRARRNKRNKVESEEFFNANPELKELDKLHGYYQREYVRPWAKKRNPDGFRHRPTFTEPSPEKHPFWYQFKKGETYKALDLQAGTISLQLLAPEGAKRAALWTTFAFRPDPRLRLIQKANPPLKEKFTYAFADPAFPGQPARPAEIRGAKLIFRRAQPDGAIYLSFTCDVPDLDSRLSILQKSCDKYGAKWACKKAMSDLGGQQPVTCAVDLGLRHLGAATVRRDGKIVRARLLREEDQPGKGPALPAIAGHKRALAKGRRKRGKPIAGEESFIELQRHTDKMGEDRFKKGARRIVAFARENGADLIILEKLGGDRRGALIPDAERERGINRALVLWNRGNLAKWVKQLAADAGMRVVEVHPYMTSQLCSRCGAMGARFSAKEGLPAFEPVGKLFACPDCGYLANADHNASVNLHKRFFGELPEVQRPNRDKRVFRVTPDDQPTVEVDMADVEKRILARGRADDLCRGKRTPF

SEQ ID NO: 310 - protein, 779 aa, Unknown
  Description of Unknown: aquatic-freshwater-freshwater microbial mat sequence
MECNREELQHLWRTHCAFNERLPSILSVLFKMRRGEWGDTEQIKKKMQAFAWGVLQLEAQNSYDPLIKAASGSARNSTARNALRKIAAKASKAIDDETAKPSESQDAAKLAKARKTLLQCQEYESSFDLFAKGLTPLKDVKDALADLPNHIERKLFEESSACIRGHLALVENWENEHVEWLKKKKDWEADPEHRKYLDVRHRFDAFEEEAGGKAGKRRGRWHLYLDWLRKNPDLAAWRGGQSSIGEPDASAKLRIQKAKPWKQRSVEAEEFWKVNPELSALNKLHGFYEREFIRRRKTKKHSDGFDHRPTFTLPHAVNHPRWFVFNAPQTSPKGYCELKLPGAPGAEGSLELLLLTGEKEMGVYPKKWTSLVFKADPRLSDFKPVTVKKNANKGKVKGQETEKPAYSFYDRQLKQHRAAQISGVKLIFKQVKLNEDGTLKSAVPYLYFTCSVVDIAITQKAQDIEWSETGETTKTGKARKRKTIPNGLIACAVDLGLRNLGFATLGVLESGEVRVLRSRNLWIGVAEPSGAHAGRWAEGPDLAHIGAHKRNIKRLRRQRGKPVEGERSHVELQEHIDHMGEDRFKKSARAIINFALNVDQTIDKKTGKPFPRADVLVMEKLEGFIPDAEKERGINRALVSWNRGQLIERLKQLAEDSGFKKRLFEIHPAGTSQVCSRCGALGRRYSIARDETGQPEIRFGWVEKLFACPNSKCGYRANADHNASVNLQRSFFLDGQAVQAFYDWKGKPEPERKTFFAAMDGKLQPALRVEHKLDGPTPF

SEQ ID NO: 311 - protein, 761 aa, Unknown
  Description of Unknown: aquatic-freshwater-sediment sequence
MSIRAIQARVECDRPTLERLWLTHRIFNERLPVILSFLFRMRRGECGDTVVERKMYHEIADFILTHSQEAPYLFNAVSIKGWKPGTAVKQSPGSEWPAQAAQLSKEGKLLYDKSNVLGDLPGTLQQMVCRESAAIISGHHELVRMWEAEHAQWLEDKSAWEADAEHQKYLALRPRFDAFEQEAGGPAGKRRGRWHLYLNWLKQNPDLAAWRGGKPEVIELSPAARRRVERAKPNRQRSVEAEEFWKGNPELSALDRLHGYYEREFVRRRKTKKNADGFKHRPTFTLPHPRIHPRWFVFNAPQTQPSGYADLVLPTKPGEEGSVRMLVINAEKANGKYPSEWVRIRFHGDPRLCNFRAVSSTRTISRGKDKGKTKESPSYVFRDRHLGQDRPATISGIKLIFRTNTDRTPKAAYLYFACTIDDLPQSDAAKSIQWTETGEITSKGKKRKNMKVPDGLVGCAVDLGIRNLGFATLARYADGQPQILRSRNIWVRRQEAKGAHTGRWSAGADLAHIGEHKRTIRRLRRQRGKPVKDEKSHVGLQLHIDHMGEDRFKQAARAIINFALNADGDCNRKTGEVHPRADVLVLENLGGLIPDAEKEHGINRALVNWNRGQLVERIKEMAQDVGLKVLEVSPVGTSQVCCKCGSLGRRYSVVRNEDTGRLDIRFGQVEKLFACPASDCPGREAGRPDRPFTCNADYNASANLHRCFLLRDQAVKTYRDWRSGGDSKKAKEERETKIRNVEDALLGPLRIMHGMEDAPPF

SEQ ID NO: 312 - protein, 654 aa, Unknown
  Description of Unknown: aquatic-freshwater-sediment sequence
MDGDTWANEAAALSAQGVLLYDKHAVLGDLPAHLRQMVCRESVAILSGHDELVARWNKEHQEWLTAKAKWEDEEEHKKYLALRPRFEAFEKEAGGKAGKRRGRWHLYFSWLKANPDLAAWRGKADSVALLSDKAKERIRKARPWKKRSVEAEEFWKVNPELQALDKLHGYYEREFVRRRKTQRNPDGFHHRPTFTLPHFTRHPRWFVFNAPQTSPQGYDNLQLPAKPHAGGSVELLLLTGDKTNGEYPSQWISIGFQGDPRLSLFRKVKKQRTVNRGKDKGTQKESDAYEFRDLHLNRWRKAEISGIKLLFRLNPNGSPKAAYLCFTCSITDEPLSSNARKIKWSETGETTKKGKKRKRKTLPDGLVTCAVDLGIRNTGFATLAVHDQGNVLIRRSRNLWAGWLGEDSKDRDRWMDGPVLAHIAAHKRKIRFLRRKRGKPVKGETSHVELQTHIDHMGEDRFKRAARAIINFALNVGSECDKKTGEVYPRADVLVLENMDGLIPDAEKEHGVNRALVAWNRGQLTKRIEEIAEDVGLKILFVSPMGTSQVCSKCGSLGRRYSIKHDDMIDRPDIQFGFVEKLFACPSCQYMANADHNASVNLHRRMVLDDKAVVAYNSFREKNKTDQATEIERIENILRPRLRLKHSLEGSVPF

SEQ ID NO: 313 - protein, 710 aa, Unknown
  Description of Unknown: aquatic-freshwater-sediment sequence
MVELYLRMRKGKHRETARKIAEIILKSPKNTAAAIMEGLTAKEWTSTRTTEWANLVRERRNAEGLLFDRHESVGSADGRNACCQRQQGPRKKPTDPSRLPVSSKFWRWLCDDACEVLKSNRGQMDDWRSEYREWRDEKTQWEKDHPEFMAFWNGLYQQFRQDCERAQIEAQQAKGQKPTFRKRGGRQWGKRFERWHLWPEWIEQHPEILAWRGQAAAADFKPVPQQEKDALRKRFKRQDKYIGALLDKLRESNSELAELDRLRRAYERQYVRFRRFPTLTLPDPDKHPRWMSLERDCLYKGFDPEKGTIKLSLVGENADGVWYMDWFDVQVQVDRRLKPSFRREVFGREGRLPPFIEGRVGRKLSQPAPSPAERQSGVAGAKLIFKQGAAHLTFTIIDQDRAPRVKPRKVADRRCPADNIFDPQGDRIPLRVVAVDLGVRHVGGYAVAEGRFENGAWSVGYITKGIVSGPQVPERFSIDAHHRQLKWARRLRGKPVFDEESCAELQDHVTHMGEDRFKKAAHAIVELARRHDVHVILFENLKGFVPSACDERWANRTRSKMLRRKTVEMVKAQCHDFGFYCNEEISPKLTSHICSKCFRPGWRFSMKAKQPWSEKQPRSKCRDFGYPAWDAGGHLFRCPHCGYRVNADINAAGNLVAKFFGLWPDEKLERKDWVYRWRENGESRQFDAKAEFEKWSDDVRSRKAARSFPY

SEQ ID NO: 314 - protein, 691 aa, Unknown
  Description of Unknown: aquatic-freshwater-sediment sequence
MSVKCFQAKVVCDTPEKREYLWLTHTLFHEALRALIPHLFKMRRGDYGADFKEIYEAITDNQNSFAKLEPITTPKAWRSKHADTGDTKNRWADLCLAVNREGRILFDRTQTPFGFGSEFWRKVCEMAIQLIHSHDGLLADWRKERAEWLDNKKQWEAANPEYMAAKPTFDAFEDEAGRLRGSRKRWLLYLEFLQKHPELAAWRGGEAKVAPLTPAERKQCRRPGDQFEIFWEKNPQLAELNRLDRDWRRNFARFKRRPTWTNPDPELHPAWFSFKRGQTYKDLDFARRTFNLNVLVGEDVKGRKGKWVTYEFRHDPRLLRLRPAEQPVKVGPNKFTWLYSDPLLKKDRPAEVKGIKLVFRNRHPYLLFSVDIADEKSAPLTRPGFDDKRLKRKATAADIPDGTRILSIDFGQRSLAACSVCEFIKGHPERPDAVFFMKLPGLKFGDIGRHEQTISRRSSRMFRAGPRSRESRHAPRGGTTFREFRRHVLKMKDDRYKKATRLILDAAVRYDAQVILVENLENYKPDLERSARENRARMRWNVQRIVEFLDKSAHPLGLRLWKVWPHWSSRFCSACGHPGARFTIPRKNAWKRFYERRHGPIRKPVTEPGGQFFICSNPKCPRSTGIINADVNASLNLPRILADDLEKPTGQGKTRLWRGQEYNPKAIAEQCQQRLDEHFRSKADLAQQTPW

SEQ ID NO: 315 - protein, 741 aa, Unknown
  Description of Unknown: aquatic-freshwater-sediment sequence
MFQARIECDRQTLDRLWLTHRVFNERLPAIMSVLFNMRRGESGRNPQERRLYQRMARFFLAMDSKNAEYLLHSVSIKGWTPNTALKMRAKVRDAHGAEVPVSGDSWAPAAAALSAKGRLLYEKAQVLGDLPATLRQMVCREAVAVISGHDELVARWEKAHADWLKDKARWEADAEHQQYLALRPRFEAFEAEAGGKAAKRRGRWHKYLSWLRANPDLAAWRGKAAPGVQDLSPQARRRVQRAGLKRRAAVEGEEFWKANPELSALDRLHGYYERAFVRRRKTKKNPDGFDHRPTFTLPHATRHPRWFVFNAPQTSPSGYADLAFPEKRGATGSIRLCLLTGDKAADGKYPHEWVPVRFLADPRLSAFRPVKRQRVIGRGKRKGEAAEAKSAYEYFDRHLGKTREARFSGVKLVFRLYPDGKPKAAYLYFACELTDEPLSERAKAIQWTETGEVTRKGKKRKSKRLPDGLVSAAVDLGIRNLGFATLARKEDGAVQVLRSRNLWTGPDLHHITRHKRRLRALRRDRGKPVAGESSHVRLQGHIDHMGEDRFKRAARAIVNFALNTDGARNGRGQAHPRADVLVLESMEGLIPDAEKERGINRALVAWNRGHLVERIRDMALDAGLKVFEVSPFGTSQVCSRCGALGRRYSLVREAETGEQAVRFGFVEKLFACPACGYRANADHNASVNLHRRFILEDAAVKAYQDLYNRPESERKVALADMESRLLSRLGVEHGLAKPPPF

SEQ ID NO: 316 - protein, 745 aa, Unknown
  Description of Unknown: aquatic-freshwater-sediment sequence
MSVRMFQARIECDRQTLDRLWLTHRVFNERLPAIMSVLFNMRRGESGRNPQERRLYQRMARFFLAMDSKNAEYLLHSVSIKGWTPNTALKMRAKVRDAHGAEVPVSGDSWAPAAAALSAKGRLLYEKAQVLGDLPATLRQMVCREAVAVISGHDELVARWEKAHADWLKDKARWEADAEHQQYLALRPRFEAFEAEAGGKAAKRRGRWHKYLSWLRANPDLAAWRGKAAPGVQDLSPQARRRVQRAGLKRRAAVEGEEFWKANPELSALDRLHGYYERAFVRRRKTKKNPDGFDHRPTFTLPHATRHPRWFVFNAPQTSPSGYADLAFPEKRGATGSIRLCLLTGDKAADGKYPHEWVPVRFLADPRLSAFRPVKRQRVIGRGKRKGEAAEAKSAYEYFDRHLGKTREARFSGVKLVFRLYPDGKPKAAYLYFACELTDEPLSERAKAIQWTETGEVTRKGKKRKSKRLPDGLVSAAVDLGIRNLGFATLARKEDGAVQVLRSRNLWTGPDLHHITRHKRRLRALRRDRGKPVAGESSHVRLQGHIDHMGEDRFKRAARAIVNFALNTDGARNGRGQAHPRADVLVLESMEGLIPDAEKERGINRALVAWNRGHLVERIRDMALDAGLKVFEVSPFGTSQVCSRCGALGRRYSLVREAETGEQAVRFGFVEKLFACPACGYRANADHNASVNLHRRFILEDAAVKAYQDLYNRPESERKVALADMESRLLSRLGVEHGLAKPPPF

SEQ ID NO: 317 - protein, 794 aa, Unknown
  Description of Unknown: aquatic-freshwater-sediment sequence
MSVRSIQARLHCDAKTLDDLWRTHRVFNERLPGINAILFKMRRGEFGGTPKEREMMQAFAWCVLRLDAKNSYDPLNKAAIGSARSASAVKAVNALIAQAKKTIAKPSAPQAMQDRGTLEEARKTMLFGPVCLDAFSKFATGYLPLKDLKDSLGDLPNAIGRRVLEEACACLRGHFALAAKWQTEHADWLTEKAKWEADLEHQKYLGLRPRFEAFEKEAGGKAGKRRGRWHLYLAWLKANPDLAAWRGKADGVTDLSKQARERIRRAKPRKQLSVEFDEFWKVNPEFQALNKLHGFYERRFSPPGKQQCGAKSKSLRKKKRNPDGFKHRPTFTLPHPVRHPRWFVFNAPQTSPKGYWNLCLPTNPEAEGSVELLLLKGEKGADGKYPSDWVKVQYRGDPRLCLFRKVKKRRTVNRGKDKGAEKEADAYEFRDAHLGLWRPTDISGVKLIFRFNHDGTPKAAYLYFTCNIKDVPLTANAKAIQWTETGEVTKKGKKRKRKTLPDGILTCAVDLGIRNLAFATLAVHHEKGNLVIKRSRNLWVGWQEGGDAKGERWLDGPDLAHIAKHKRKIRWLRGKRGKPVKGESSHVELQTHIDHMGEDRFKRAARAIINFALNAQAACDRHGEVYPRADVLILENMDGLIPDAEKEHGINRALIAWNRGQLTKRIEEMAKDVGLKIIPVSPMGTSQVCSRCGSLGRRYSIGRDEKTGQAEIRFGFVEKLFACPNSDCGYLANADHNASVNLHRRFALDDKAVAGYAEHRVKGDDERTKEIADIEARLRPRLRLKHSLDGPVPF

SEQ ID NO: 318 - protein, 727 aa, Unknown
  Description of Unknown: aquatic-freshwater-sediment sequence
MSARAFQAKVVVERPEDLQALRDLHRRFNEFLPPVIEALFKMKRGALGPDAQLLFSSMTSNQNAVAKLEPLTTPKPWKPRKKQQLDETWVQAAVRLREGRGILFDRFEAMPDVSSEFRRKVFEMAFACVDGHLQLVKRWRKEHEDWLKQKERWERGLVVTEEGEDEASAETRTWRERYMRLRPLFEEFEQRGVVRRNRRRWHEYIEFLSTHPAFAEFRPNALTDQERADLRDPIARFERLLEKNADLERLDNLHGQYQDLIRPWARKRNPDGFKHRPTFTMPSVASHPQWFSFKKSATYKNLDLEKGVLALALGKEGAKAQWVTVRLATDPRLARFRPAQRVGKGKRARSWVYLDPISGEEFDAEVRGLKLMFPKGIQGPAYLMFTVQLSDRPRQVVPRKDWTPPEGLLTLACDFGQRHLGAITMCRYENGSPVQVPFTPAYLDHGRGRRTPSKPVSAWLPVIPGLRFDDIREHELEISARLSATYGDPRSRRQGGVGASRGRHAAAGSRPFAQLRRHIDEMREVHFKKAAHLIVATALKNGAQVVIMEFLANYRPDLERSHRENRARMIWAVRRIQEFVEQTAALYGIAVRTPSPYLTSQVCSACGSPGARFTRPSAMDWTRKPPGRKESWYEKRFGPKAKAVIEPGGPWFCCSNPNCPRPCRVIQADINASLNLHRRFYERFDLSWLPDGKPARKQFWGRLKGAIQAYLDQFDSLPRRPGATSHE

SEQ ID NO: 319 - protein, 740 aa, Unknown
  Description of Unknown: aquatic-freshwater-sediment sequence
MATKTYRARFVNLTGRLDAALARTHHVFVECLRQLIGRYIEMRKGKYGPECRQLAEVILSRFNTFAHGVMDKLSRPNWESRLTDDWVLLANSVCEAQGPLFDQHDGFAVVDGVTIHTKPHSKSEPVKNRLPVPAKFWHQVCDSASAYLQSNRALMEQWRNERKDWFKNKTEWEQKHQEFMTFWNGMFKQFEDACEKQRLLSQQAAGQLPTAQKKQSRERGKRLGRWHLWYEWLVAHPEIIEWRGKAKATDFVFVPDELKKIMSKHSRQDKFIPKHLDWLKENNPELKVLDDLRRTYVRNYLRFKRPPTLTLPSPKKHPYWFTLELDQFYKSPDFDKGTVKVLLIDENDNGAWFFNWFDAGLLCDKRLKPSYRAEMFRNKGRYPPYIEGKVGRTLNRPAGSSKDRKAGYAGAKLVINGKRKELLFTVIEQDCPPSIKWTKVKHRRCSADNALSPDGERIPIKVMAIDLGIRHAGAYAIAEGTADDDIWQVKWLKKGIIDNSAMPDLYQIRGHDRQLRRGRSKTGKAPKGERSFIDLQSHRTNMAQDRFKKAANAIINIARSYKVDVIIFEKLESLAPTAFDERWMNRQLRDMNRRKIVDMVKQQAAEFGIKADDNVSPYLTSHVCSRCFKGGWRFSMKAKQPYKEKLSRKNCCDYGYPTWDAGGHLFRCPHCGYSVNADINAACNVGAKFFGLWPATMSKIKREWVYTWDAENSEPFNAKEAFDKWAEDVKKHKALADSPF

SEQ ID NO: 320 - protein, 744 aa, Unknown
  Description of Unknown: aquatic-freshwater-sediment sequence
MVTRALRARVIHPDATLLAALKRTHRVYNVLLRQMVELYLRMRKGKHRETARKIAEIILKSPKNTAAAIMEGLTAKEWTSTRTTEWANLVRERRNAEGLLFDRHESVGSADGRNVCCQRQQGPRKKPTDPSRLPVSSKFWRWLCDDACEVLKSNRGQMDDWRRDYKEWRNEKARWEKDHPEFMAFWNGLYQQFRQDCERAQIEAQQAKGQKPTFRKRGGRQWGKRFERWHLWPEWIEQHPEILAWRGQAAAADFKPVPQQEKDALRKRFKRQDKYIGALLDKLRESNSELAELDRLRRAYERQYVRFRRFPTLTLPDPDKHPRWMSLERDCLYKDFDPEKGTIKLSLVGENADGVWYMDWFDVQVQVDRRLKPSFRREVFGREGRLPPFIEGRVGRKLSQPAPSPAERQSGVAGAKLIFKQGAAHLTFTIIDQDRAPRVKPRKVADRRCPADNIFDPQGDRIPLRVVAVDLGVRHVGGYAVAEGRFENGAWSVGYITKGIVSGPQVPERFSIDAHHRQLKWARRLRGKPVFDEESCAELQDHVTHMGEDRFKKAAHAIVELARRHDVHVILFENLKGFVPSARDERWANRTRTKMLRRKTVEMVKAQAGEFGFLCNEKISPKLTSHICSKCFRPGWRFSMKAKQPWSEKQPRSKCRDFGYPAWDAGGHLFRCPHCGYRVNADINAAGNLVAKFFGLWPDEKLERKDWVYRWRENGESRQFDAKAEFEKWSNDVRSRKAAKSFPY

SEQ ID NO: 321 - protein, 796 aa, Unknown
  Description of Unknown: aquatic-freshwater-sediment sequence
MATKSFEARVLCRDDPPDKKGEKYSAEQKKQFLWYTHQVFNESIRKVLPYVFKMKRGELGDEFQAIYYAISSSQDAVGKLEAITSLDWSSKKIGKSEPEKWKEILRYRELEKEFRQKLKDEEKNTKKFRKELQKKKKALANEIGQKDIWADAASIIQQKNNLLFDREKILPNLPSEFRRKIFEMCIQLIHGHQELVANWQDEHAEWLQEKDKFEEEHPDYMKVRPILEEFEKEAGKVKGSRIRWLKYLDYMSSHPELAGWRGGEAKVEPLTSAERAKFRKPREHFEAFFKKNPELSALDSIHKQYQEKFARTQTKRTPNPDGFKHRPTFTLPSANLHPAWYSFKGATDPTKGATYKLNFREDRRVDSFMNLKVLTDMEGEGRNPKGMITYDFEPDDRIRDFRYIGTTEKGKKAKGFVYYDKILEKERPAKIQGIKLVFRPPRSDGVPYLIFSCSIEDEKSKIKIWQDKESEEGPDEARKGKKAKKIYPPELVTLAIDFGQRHLGAITICKNNNGKPEQIKFIPAYPKRKQGKQTKPVSAWLAKVPGLTFNAIGMHEKEIRAGMHQRFQDPKSIRQAGEKEGRASKPRHIPETETSFAHLRDHIAGMKEDHYKKAANLIIKTALQNGAQVILLEDLKKYRPMLEKESRENRRRMQWAVRQTAEFLKKTAKPLGLLIYDRINPAYTSSMCSVCGNPGARISLPSKRNWEKYYAEYYGKERRMIAVVGGQFFCCPVCKKIINADINASQNMHKVFYNTFNWPPKMEKKEKKIFWESVREQAQNILDQKAEPKREEDISY

SEQ ID NO: 322 - protein, 759 aa, Unknown
  Description of Unknown: aquatic-freshwater-sediment sequence
MSVRAIQARVECDRATLEHLWRTHRVFNERVPVVLSWLFKMRRGECGRTEEEKRLYRTIADFVLANSQNAEAILNAVSIPNWTPTSARKLKAKTVLSDGTEKVSTGMDWADKAAELSAAGRLLFDKREMLFDLPGTLRQMVCRDAGAIISGHEELVAVWKKAHADWLKAKADWESQEENKLYLNLRPEFEAFEQAAGGRAAKRRGRWHLYLKWLKDHPRLGGWRGGEPIVNELSEQARRRIQKAKPWKQRSVEGEEFWRANPELAALDRLHGYYEREFIRRRKTKKNPDGFTHPPTFTVPHAVRHPRWFVFNAPQTSPIGYRNLVLPPHAGPEGTVELRLLTGDKTDGKHPGNWVKVRFRADPRLSDFRPAKRTRSFNRGRNKGQTTQSDAYEYFDHHLGLMRSAEIKGLKLIFRFNPDDSLRAAYLYFTCDVGSIPFTERTRAIQWTETGEVTKKGKKRKTKKLPDGLIACAVDLGLRHLGFATRARYAGANPEILRSRNLWLGREEQKGRHPGRLSPGADLRHIAHHKRNIRRLRRLRGKPVKSESSHVELQTHIDHMGEDRFKQGARAIINFALNVKKGPDTRTGEVHPRADVLILEKLAGLLPDAEKERGINRALVAWNRGQLVKRVKEMAQDVGLKVFEVSPVGTSQVCSRCGALGRRYSIVPDDRTGRPGFRFGWVEKLFACPNPDCRYRGNADHNASVNLHRRFMLEDAAVKAFLDWRAKTKKEQEEVLRRIEKALCADLLRMHGLEEPTPF

SEQ ID NO: 323 - protein, 702 aa, Unknown
  Description of Unknown: aquatic-marine-deep subsurface sequence
MSTKAIQAKVICDTWEHRYFLWITHKLFNDSVQFVIPKVFAMKRGELGDDFKLIYDSIRSNQDAIGKLEQITSLEAKSNRQEKWVLAAKKIREEKNLLFDRKKELPGFSSEFRRKVFEMTIQKIHGHQELVDDWEKEHNAWLKEKEKFEKDHQDLMALWSEIEKFEKEAGSLKGSKKRWYRYLEFLGTHPAFSTYRDGGPLSKEERAGLKRPGEHFELFFKKNPKLVPVDSAIKKYCDLLRPWAKKRNSDGFKLKPTFTLPNPIVHPEWYSFKKNSTYRKLDLQKGEVELKIIPSEDIDKRDPKKYISYRFGADPRIKNLIPSNIEKIGREKYDHNYFDPVLDKKRPAVIKGIKLIFKGLNRKRKLWAEYEREKNTDKKKQLFAQWIDKLRPYFVFTLTLADEAKPVKLEWNKKEKHSVIPKELVTMAIDVGQRDLGAVTIAREHNGVPVQIAFLPQYWKPLKNGNSAKPVKAWLVDIPGISFEALKKHEKEARGRERGAKARRVKGENYAIGLRQHILHMKEDRYKKAGSILLRTAIKNKVHVIILEDLKKYKMNLERSKQENRQLMVWAIRKIQDFLELQAKPLGVRVRSVWPHYTSQVCSACGEPGKRASLPSKSSWEKFYQKKYGEKRKWIVENGGKMFVCSNPNCVRKSRMINADINASLNLHKKFYGILTYPPKTKEFKQQLTLDIQNYLDTILKF

SEQ ID NO: 324 - protein, 736 aa, Unknown
  Description of Unknown: aquatic-marine-deep subsurface or subsurface metagenome sequence
MATKSYRSRIVCTKAELDDLVRTHRVFNAGVRAMVDLYISMKKGTYGETAKEIARYLLDHSGTKGHDLMNPLTDRGGKDTRDDEGMKLVRRHRQEHGILFPRHERICEIDGRKVRAGSSAKKEKSRDTLTISSIFWHFICNQAIEYLRSNNELMAAWREERGKWLRDKEKFFAENPGFREFVEGYLAAFDAHAEKARQEFQTKAGQRAHARKRKKSGSGKRFSRWHLWCEWICDHPEIIEWRGKAKGEGFAFLTAEEVRAIEEEFPKREDRRAGRMLDMLTRKNPELAEVEKLRKKYNNDYARFRRPPTLTLPSAKKHPCWYRLEKGKLYRNEDFEKGTIEILVICHDEKEDAYYMDWRPFSIKPEPRLVPSHRARAFAAEGRYPPYKEGKVGNTLNRPAESAEERLAGLKGAKLILKPKGNAQLVFTVVEQNEPLKAKFRKKAGATSSADRLDILDGNKATRVMGIDLGARHVGAYVITEGKKKGDGWKLAPLRKGFIDSPDLPRLRSITRHENQLKKGRRKRGKPVKNERSFISLQGHRTKMSTDRFKKAANLIVEKAREHDVHIIVFEDLRRLKPTAYDERWLNRQVRSMNHRHIFDLAKEMAPEFGIQVTDINPYNTSRLCSKCGFPGYRFSMKRKNPYREQAPRRECADFGYPVWDSGGHLFRCPHCGYRVQADLNAAGNIARKFFGHFMDWECKEYTYRNAVQPSFDARKDFDQWASGVLKRRTMPDAPF

SEQ ID NO: 325 - protein, 679 aa, Unknown
  Description of Unknown: aquatic-non marine saline and alkaline-hypersaline lake sediment or sediment metagenome sequence
MSQRALAVRLLVDSEDDRAALWRTHRIFNERLGWVLRQMHRMKRGEPDARYAEIFNAITTSQRATAALEAVTSLAWTGTKEDRWCQLARALIQEGTLLFDREARLAGLSKEFRRKLFEAAFQMISGHRELLAQWERDHNEWQQARETWEAENPEYMAIRPALQRFEAEHGQAAKRRARWHKWRAFLQGSSQLAGWRGGPQVVNEISADARRRIERARRNKRNKIEAEEFFRVNPELKELDAKHGYYQREFLRPWAKRRNADGFKHRPTFTEPSAENHPFWFQFKKHETYKDLNLKVRSLRLKLLASDSAVPGSQWRDFRFRVDPRLLDLSEAQSPAKIGIARFSLLFNDRALAMEDRPAEIRGAKLIFRPAQRDGRVYLSFTCDVADLPCRVPLKQESWDKYSAEWLCKKSREALDGEDPVTCAVDLGIRRLGAASVRRDGKIVRARIIREEQQRGCGPRLAAIKNHKRALKAGRRKRGKPVRGEQSLVELQEHVDKMGRDRFKKGARRIVNFAHQNHCDVIVMEKLAGLIPDAERERGINSALVNWNRGHLVKWVKQLANDAGMRVVEVYPHWTSQLCSRCGAMGARFSADHGHVAFEYVGSLFACADCGYVANADHNASVNLHRRFYGELPKVKKLREGVYELAKPDHAPKEVKLAELRSAVSVAAAAMCRGQASPF

SEQ ID NO: 326 - protein, 741 aa, Unknown
  Description of Unknown: aquatic-non marine saline and alkaline-hypersaline lake sediment or sediment metagenome sequence
MATKTYRARIVQISPRLGAALERTHYLFAEALNQMVRRYIDMRKGKYGQECKKLADIMLTRSNTFAHGVMDQLTREISTSGLTDEWVDLARAVHKSHGPLFLQHDGFAEVDGVMLHTKRHGKVSPMPGRLPVNAKFWHQVCDSASAFLKSNNELLENWRQGRKEWLQEKADWESANADFMRFWNGSYQEFEETCEIKRKESQALEGQKVVEKKRHRRDRGKRMSRWHLWYNWVITHPEIIEWRNRAKAAEFRPVPPTVHKKIKNKYPRQDKHITKFLDWLKENNPELKALDSRRRFYVRNYLRFRRPPTLTLPSANKHPYWFTFELNQFYKNVDFDKGSIQLLLVDETEEGSWFFRWFDAKIQCDPRLRPCVRAGVFATKGRYPPYIGGKVGNKLNRPAERPENRKAGYAGAKLVLNKRRKELFFTVIEQDCPRKVSWKKTKQRTCRGDNVFAKDGSQIPLKVMAIDLGIRHIGAYVIAEACRNRGVWDISWQHKGITGRHAVPGLKEIRQHDRQLRKARSQRGKPVQGEESFIELQDHRTNMADDRFKKAANTIVELARQYDVHLILFERLGNLSPTAFDERWMNRQLRDMNRRQIVDTVKLQAREFGIECLEDISPWMTSHICSRCFKPGWRFSIKRKNPYGERFTRKNCRDYGYPVWDTGGHLFRCPHCEYKCNADINAACNVAAKFFGLWSGLDGLKRDQWVYTWQENQPKTFDAKKTFLEWALDVRNRKLMGDSPF

SEQ ID NO: 327 - protein, 762 aa, Unknown
  Description of Unknown: aquatic-non marine saline and alkaline-hypersaline lake sediment sequence
MSVKTIQAKLECDRETLETLWRTHTVFNEGLLPILALFFKMKRRETGSTEEEKDLYKRICEFILRTNASNPGYLLNSVCLENWKPDSARKTKAEVVRDGKKEKISAEEWIDDLLNMKEESGLLFLKQELLNGLPIMFFEKLVAESKAILSAYEELQYQWEVDHNKWLKEKEGWEKKHKEYLAVRSLFQKFEQEVKGKITKKRRRWHLYKDWMKRTPELVAWRGKETKVYGLTEEDREAIKKAPLKKKIGVEVGLFFKRNPELSALDKLHSYYEEKFVRRGKKKRNCDGYEHRPTFTLPHSVKHPRWYVFSGPQTGNGYKNLNIPERKKDFGQLDLLVLTDDKVDGEYPREYRTVKFRGDHRFLDIRGATRTRLVTKGKNKGQEVEEKFAYEMYDRYLKIWRPLKISGAKLAFRDIKINQDGSLKSAVPYLWVTLNLEDLPISEKAKEIKWVETDEVKDNGDKRKKIQIPEGLITCAVNIGIRNLGFGTLAVGEKGKARILRSRNIWIGEEEKTGKHKGRWQKGPTLRELRDHKQEIRRLRKLRGKVVKGERSHIKLQNHITNFADDRLKKAARKILNFALNVENHIDKKTGKPYPRADVLLLEDLSTLVPTTKKRRDQNQLLIEFMHRGTLSKIEEMAKDAGLKVLRIKPGGISQVCPKCGGIGRRYEIRIDQETKKPDIHFTDVIDDIDCQKLFVCASCSYRGNGDHVASVNLHRKFYDWSVVDKYFTLLRSDNYKEQKKVIEEELREFLRKEHFPQMALN

SEQ ID NO: 328 - protein, 670 aa, Unknown
  Description of Unknown: aquatic-non marine saline and alkaline-hypersaline lake sediment or sediment metagenome sequence
MTIKSFEAKIVTNPSLRETLEYTHRVYNEDLKYMVEVLLAMRKGKHGDGYVEFWREHLQKAANPSGLLEPLTTPDGPKADAKSKKSKIIRQLFKEHGMLFDRDERWPHWNARHRRHLFDDAKKWARQLDERLERWRSEHAQWLKEKEKFENENPLYMAVEPLFGGFFKEFGQGGKRRERWAAYYHFLLAHPELANWRGQADAIVPLTPEEEAACLRDRRRGVKKRLDLFLEKNPELEALHKLDAKYGRNMVRRSARHRNIDGFRHPPTMTLPHSRLHPEWITFQAGETYKDLDLNGGTVRLNILPPDAETSKLHSVEFRAEKRLRRITPRETPLRKGRNEFNKNYRDAADRVHPARVKGIRLILRPRGAYLKITVELDRPESRTGLKQQTCDKYSSNWCYQEIVKRREGKPLKCLSLDLGVRHLAVGVVVQETRANGDRETVIEGVRFFKEVGGRPFPSLDEIRRHKDRLREKRSQTRRAPKGRRTCIALQDHVTKMGQDRYRKGAAAIVRYAVERDVDVILLEKLAGFIPDAAKQRGINKALMEWNRRKIADFVKLLAADHGISVVEVAPHHLSQLCSKCGELGRRFSWKDGLPKFGTVEKLFVCPACGYQANSDYNAAVNLYKAFSGAYEERPKKAKKGVYKYRDRTICLKKLDGQLAERLTQEQTPF

SEQ ID NO: 329 - protein, 762 aa, Unknown
  Description of Unknown: aquatic-non marine saline and alkaline-hypersaline lake sediment or sediment metagenome sequence
MSVKTIQAKLECDRETLETLWRTHTVFNEGLLPILALFFKMKRRETGSTEEEKDLYKRICEFILRTNASNPGYLLNSVCLENWKPDSARKTKAEVVRDGKKEKISAEEWIDDLLNMKEESGLLFLKQELLNGLPIMFFEKLVAESKAILSAYEELQYQWEVDHNKWLKEKEGWEKKHKEYLAVRSLFQKFEQEVKGKITKKRRRWHLYKDWMKRTPELVAWRGKETKVYGLTEEDREAIKKAPLKKKIGVEVGLFFKRNPELSALDKLHSYYEEKFVRRGKKKRNCDGYEHRPTFTLPHSVKHPRWYVFSGPQTGNGYKNLNIPERKKDFGQLDLLVLTDDKVDGEYPREYRTVKFRGDHRFLDIRGATRTRLVTKGKNKGQEVEEKFAYEMYDRYLKIWRPLKISGAKLAFRDIKINQDGSLKSAVPYLWFTLNLEDLPISEKAKEIKWVETDEVKDNGDKRKKIQIPEGLITCAVNIGIRNLGFGTLAVGEKGKARILRSRNIWIGEEEKTGKHKGRWQKGPTLRELRDHKQEIRRLRKLRGKVVKGERSHIKLQNHITNFADDRLKKAARKILNFALNVENHIDKKTGKPYPRADVLLLEDLSTLVPTTKKRRDQNQLLIEFMHRGTLSKIEEMAKDAGLKVLRIKPGGISQVCPKCGGIGRRYEIRIDQETKKPDIHFTDVIDDIDCQKLFVCASCSYRGNGDHVASVNLHRKFYDWSVVDKYFTLLRSDNYKEQKKVIEEELREFLRKEHFPQMALN

SEQ ID NO: 330 - protein, 792 aa, Unknown
  Description of Unknown: aquatic-thermal springs-hot spring or hot springs metagenome sequence
MATKSFEAKIVCKPDEKYTAEQKKQFLWFTHQVFNDGVRKVIPYVFKMKRGELGPEFQAIYYAITSSQDAIGKLEAVINPDWTSGKIGKSDPNKWKELLKYQELEKGFRQRLKEEGIKSTKKFRKELEDEKKKLAKEIGQKDIWADAAAILRNKNLLLFNRDELLPNLPSEFRRKIYEMTIQLIHGHQELVANWEDEHAEWLIEKDKWEEEHPEYMNVRPIFEKFEKEQGKVKGSRIRWLAYLDFLSSKPELANWRGKAKETIPLTKEERAGFRKPGQHFAAFFNKNPELQELDRLHKEYQEKFARTQSKRTPHPDGFKHRPTFTLPDAMRHPVWYSFKGATDPTKGSTYRNLDLENCTLDLKVLTAMEGEGRNPGGMIQYAFEPDERIKGFRYVGTTEKGKRAKGYIYYDPILEKERPAKIQGIKLVFRPPRPDGTAYLIFSCQIEDEKPKIKIWKDKEEESPGEITKRKKTEVYPPELITLAIDFGQRHLGAITICKNNNGRPEPIRFIPAYPKRRKDRESKPVSAWLAKIPGLTFNAVGMHEKEISAGMSRRFQDPKSIRQAGEKEGRKSKGQHIPETETPWAHLREHIANMKEDHYKKAANLIIRTALQNGAQVILIENLRNYRPMLERTNLENRRRMQWAVRQTAKFLEDTARPLGLIVRQVSSAYTSRFCSSCGHPGARVSLPGQKNWEKFYAEKYGKERKMIAVAGGQFFCCPACKKIINADINASLNMHKVFYQNFIWPGKIDKKDTKNFIWQGKNYNWDQIADDVQSFLDQKAGIKKEDDIPY

SEQ ID NO: 331 - protein, 789 aa, Unknown
  Description of Unknown: bioreactor metagenome sequence
MSTRAIQARVVADKALLQKLWLTHRAFNEHLPHFSQTLFRMMRGELGDSDQDKAQWAGFVKGVLAQPSKNAYDCLIKATNQTTRSDTTAAKALSKMEAAARKDIDALNAVPEAKRDPEKFAEASNRLEICRLYNAAFEEFRKGNRPLAHSRQQLDALPNFIERKVIEESVAILRSHLELVELWKAEWRQWSDDKAKWEADEVNRRYLAIRPIFEQFEESSGRSAHRSFRWKAYFEFLKSHPELAAWRGGAAVVHPITDAGLRAIQRARLRKKDQIFAEEFFKANPELEALHRRHMEYEKRFVRRRKSKRSKAWITGFKNRPTFTLPDALRHPRWFVFNAPQTAPAGYRKLRLPNTPGGEGSMELELLSGTMEKGEHKTVRTTIRFRGDPRLALFKPVMVKRKAIKGAIKGQETDKAAYVFSDPQLHKDRPAKIGGAKLILRNIKLDEAGQLVSATPYIYFTVDVESPRWSPLAAAIKSVDDVPGGDGRKSRRRSLPDGLVVCTVDLGIRNLGFATLARIEDGKPRILRSRNLWLGFEETGKHEGRWASGPDLTHISNHKQELRRLRRMRGRPVAGEESHAELQAHIDHMAEDRFKKAARLITDFALNTDRNSPKGQETPYPSADILVVERLAGLVPQADKERGINRALIEWNRGQLVERLKLVTESVGLRLFEIGAAGTSQVCSRCGALGRRYSIVPDPHPLFRPAPHVIRFSEVEKLFACPACGYRANADHNAAVNLQRRFALGETAIAAAMDLWHRPKPEKEAMRKSIEAQLRSKLEIEHKLAEPLP

SEQ ID NO: 332 - protein, 679 aa, Unknown
  Description of Unknown: bioreactor metagenome or lab enrichment-defined media-ionic liquid and high solid enriched sequence
MGIKSWRVKLWVESPEIRATLEYCLSLWNTSAALLCRHVLAMRRGDFGPEGQAIWEHLKKTPHNFHVLYPISNGSGIEKTTRYYPDARAFVNKYGYGALGPVRSASGCLWKQLTKAVRERTHSYDKTCEKWSEEHSKWLEERAKWEAEHPEYMAIRPLIDTFHAKHGVTRGRRNRWALWLQFLMETPELVRWRNKTAKVVPLTDSELKRIRSKRRGAARREQALFYEKNPELAELNRIHGIYERRFARSAAKRKNPDGFRHRPTFTLPSEAKYPDWPRFQAGEGWRDLDLDRRTICLKLPTDGGSARWVQVHFVPDPRLQRLARLKQPVKEGATRYDYSLDMPSGHTVLAQPQEVRLIRRGSSYFATIRLSLHSAPSAIPVPQTAASSPAGMLRKIRTDAPELKLITCAVDLGVRHLGAATIAREGEIIGRRILHNRFLAPGADGGVINIPSLPQIAQVRRQIRCAQRRSGRISPKVAGCRHLWTHYRHLCEDRYKKAVAAIFGFARAHGAHIVLFEDLKMLNPDSANERGVNRALQNWNRGRIVEFAKNTAEDAGLCVVTVPAYWTSRICARCNAFGVRFNQGQRRKPGDDGHVSRVACELDFLGHWFLCPSCGRSVHADLNASENLHRVFLGTFPTVQTIQRQPRIYEINGQRVALDEIQQRAVEILASRRAGDTPF

SEQ ID NO: 333 - protein, 757 aa, Unknown
  Description of Unknown: bioreactor metagenome sequence
MHLWRTHCVFNQRLPALLKRLFAMRRGEVGGNEAQRQVYQRVAQFVLARDAKDSVDLLNAVSLRKRSANSAFKKKATILRNGQRREVTGEEVFAEAVALASKGVFAYDKADMRAGLPDSLFQPLTRDAVACMRSHEELVETWKKECREWLDRKSKWEAEPEHALYLKLRPKFEKGEAERGGRFRKRAERDRAYLDWLEANPQLAAWRGKAPPAVVPIDEAGKRRIARAKAWKQASVRAEEFWKRNPELHALHKIHVQYLREFVRFKQRPTFTMPDPVRHPRWCLFNAPQTSPQGYRLLRLPQSRRTVGSVELRLLTGPSDGAGFPDAWVNVRFKADPRLAQLRPVKVARTVTRGKNKGAKVEADGFRYYDDQLLIERDAQVSGVKLLFRDIRMAPFADKPIEDRLLSATPYLVFAVEIKDEARTERAKAIRFDETSELTKSGKKRKTLPAGLVSVAVDLDTRGVGFLTRAVIGVPEIQQTHHGVRLLQSRYVAVGQVEARASGEAEWSPGPDLAHIARHKREIRRLRQLRGKPVKGERSHVRLQAHIDRMGEDRFKKAARKIVNEALRGSNPAAGDRYTRADVLLYESLETLLPDAERERGINRALLRWNRAKLIEHLKRMCDDAGIRHFPVSPFGTSQVCSKCGALGRRYSLARENGRAVIRFGWVERLFACPNPECPGRRPDRPDRPFTCNSDHNASVNLHRVFALGDQAVAAFRALPPRDSPARTLAVKRVEDTLRPQLMRVHKLADAGVDSPF

SEQ ID NO: 334 - protein, 769 aa, Unknown
  Description of Unknown: bioreactor metagenome sequence
MHLWRTHCVFNQRLPALLKRLFAMRRGEVGGNEAQRQVYQRVAQFVLARDAKDSVDLLNAVSLRKRSANSAFKKKATISCNGQAREVTGEEVFAEAVALASKGVFAYDKDDMRAGLPDSLFQPLTRDAVACMRSHEELVATWKKEYREWRDRKSEWEAEPEHALYLNLRPKFEEGEAARGGRFRKRAERDHAYLDWLEANPQLAAWRGKAPPAVVPIDEAGKRRIARAKAWKQASVRAEEFWKRNPELHALHKIHVQYLREFVRPRRTRRNKRREGFKQRPTFTMPDPVRHPRWCLFNAPQTSPQGYRLLRLPQSRRTVGSVELRLLTGPSDGAGFPDAWVNVRFKADPRLAQLRPVKVPRTVTRGKNKGAKVEADGFRYYDDQLLIERDAQVSGVKLLFRDIRMAPFADKPIEDRLLSATPYLVFAVEIKDEARTERAKAIRFDETSELTKSGKKRKTLPAGLVSVAVDLDTRGVGFLTRAVIGVPEIQQTHHGVRLLQSRYVAVGQVEARASGEAEWSPGPDLAHIARHKREIRRLRQLRGKLVKGERSHVRLQAHIDRMGEDRFKKAARKIVNEALRGSNPAAGDPYTRADVLLYESLETLLPDAERERGINRALLRWNRAKLIEHLKRMCDDAGIRHFPVSPFGTSQVCSKCGALGRRYSLARENGRAVIRFGWVERLFACPNPECPGRRPDRPDRPFTCNSDHNASVNLHRVFALGDQAVAAFRALAPRDSPARTLAVKRVEDTLRPQLMRVHKLADAGVDSPF

SEQ ID NO: 335 - protein, 769 aa, Unknown
  Description of Unknown: bioreactor-anaerobic-anaerobic biogas reactor sequence
MHLWRTHCVFNQRLPALLKRLFAMRRGEVGGNEAQRQVYQRVAQFVLARDAKDSVDLLNAVSLRKRSANSAFKKKATISCNGQAREVTGEEVFAEAVALASKGVFAYDKDDMRAGLPDSLFQPLTRDAVACMRSHEELVATWKKEYREWRDRKSEWEAEPEHALYLNLRPKFEEGEAARGGRFRKRAERDHAYLDWLEANPQLAAWRRKAPPAVVPIDEAGKRRIARAKAWKQASVRAEEFWKRNPELHALHKIHVQYLREFVRPRRTRRNKRREGFKQRPTFTMPDPVRHPRWCLFNAPQTSPQGYRLLRLPQSRRTVGSVELRLLTGPSDGAGFPDAWVNVRFKADPRLAQLRPVKVPRTVTRGKNKGAKVEADGFRYYDDQLLIERDAQVSGVKLLFRDIRMAPFADKPIEDRLLSATPYLVFAVEIKDEARTERAKAIRFDETSELTKSGKKRKTLPAGLVSVAVDLDTRGVGFLTRAVIGVPEIQQTHHGVRLLQSRYVAVGQVEARASGEAEWSPGPDLAHIARHKREIRRLRQLRGKPVKGERSHVRLQAHIDRMGEDRFKKAARKIVNEALRGSNPAAGDPYTRADVLLYESLETLLPDAERERGINRALLRWNRAKLIEHLKRMCDDAGIRHFPVSPFGTSQVCSKCGALGRRYSLARENGRAVIRFGWVERLFACPNPECPGRRPDRPDRPFTCNSDHNASVNLHRVFALGDQAVAAFRALAPRDSPARTLAVKRVEDTLRPQLMRVHKLADAGVDSPF

SEQ ID NO: 336 - protein, 638 aa, Unknown
  Description of Unknown: bioreactor-switchgrass degrading sequence
MRRGDFGPEGQAIWEHLKKTPHNFHVLYPISNGSGIEKTTGYYPDARAFVKKYGYGALGPVRSASGCLWYQLTKAVRERSHSYDKTCEKWSEEHSKWLEERAKWEAEHPEYMAIRPLIDTFHAKHGVTRGRRNRWALWLQFLMETPELVRWRNKTAKVVPLTDSELKRIRSKRRGAARREQALFYEKNPELAELNRIHGIYERRFARSAAKRKNPDGFRHRPTFTLPSEAKHPDWPRFQAGEGWRDLDLDRRTICLRLPTDGGSARWVQVHFVPDPRLQRLARLKQPVKEGATRYDYSLDMPSGHTVLAQPQEVRLIRRGSSYFATIRLSLHSAPSAIPVPQTAASSPAGMLRKIRTDAPELKLITCAVDLGVRHLGAATIAREGEIIGRRILHNRFLAPGAAGGVINIPSLPQIAQVRRQIRCAQRRSGRISPKVAGCRHLWTHYRHLCEDRYKKAVAAIFGFARAHGAHIVLFEDLKMLNPDSANERGVNRALQNWNRGRIVEFAKNTAEDAGLCVVTVPAYWTSRICARCNAFGVRFNQGQRRKPGDDGHVSRVACELNFLGHWFLCPSCGRSVHADLNASGNLHRVFLGTFPTVQTIQRQPRIYEINGQRVALDEIQQRAVEILASRRAGDTPF

SEQ ID NO: 337 - protein, 778 aa, Unknown
  Description of Unknown: cave metagenome sequence
MGVRAIRARIECDRETLLSLWRTHRVFNERLPSLIAKLFAMRRGEFGSNAAQRKLYERAVRFILARDSKDAPYLLNSVSIKGWKHATALKMKARVPDGAGDVQEVTGDSWAAEAATLSANGTLAYDKETERDGLPDSLFQPLIRDAVAYISGHDELVRNWRKEHEDWLKKRAEWETKDEHKKYLALRPQFDQFEEAVGGKAGKRRERWHLYLKWLRDNPDLAAWRGGAAVVRPLDARAQGRVARAKPWKQRSVEAEEFWKANPELSALDRLHGFYEREFVRRRKTKRNPDGFDHRPTFTLPDPVLHPRWALFNAPQTSPSGYRALSLPMGRAGFGSVELCLLTANRDGREWPRAWKSIRFRSDPRLAQFCEHTETTTFVKGKKKGQAKTRQSFSYTDNQLGGINRPAQISGAKLILKDLRLNDDGSLKSATPYVVFACTIDDQPLTDRARAIQWSETGEVTKTGKKRKAKKLPEGLVACAVDLGVRNLGFLTVAVASDNPGDGVRVLRSRNLWLGEFEGDGQWSPGPHLAHIGAHKREIKRLRRLRGKPVKGEESHIELQQHIDGMGKDRFKKAARAIVNFALNVEDRASPRTGEVYPRADVLIVEKLAGFIPDAERERGINRALVAWNRGQLVTRLKEVAKDAGLKLFEVHPAGTSQCCSKCGALGRRYSIVRDDETRAPVIRFGWVEKLFACPNLNCAGRKSMHCDQPFVCNADHNASVNLHRRFVMDDKAVAAFFAWKARPDGEREQSVRSIDDALRPQLERIHGLSASPLETPF

SEQ ID NO: 338 - protein, 743 aa, Unknown
  Description of Unknown: freshwater sediment metagenome sequence
MSVRSFQAKVECDKQIMEHLWRTHTVFNERLPVIIKILFQMKRGECGQNDKQKALYQNIAKSILDTNAQNADYLLNSVSIKGWKPGAARKYNKGSFTWLDEAANLSSKGILVYDKDQVLGDIPLMMRQMICRQSVETIKSQQEILKNWENEYKEWLKKKEEWESQEDNKKYLALRDKFEQFRKSYGGKKSKKRGRWHLYLKWLRDNPDLAAWRGGKAEINPISEKAQSRINKAKPNKKNAIELEEFLEANPEIKKLDELHGYYERTFIRRRETRKGKELTGFKQKPTFTLPHSTTHPRWFVFNAPQTNPAGYRNLILPQKTGALGSLEMRLLNGDKNNGDYPDDWINVRFKADPRLALMRGIKIQRIVRRGKDAGQTKESDSYKYFDKFLNKWRPATLSGVKLIFKFNPDKSVNTAYLYFTCDITNEPLTETAKKIQWIETGEVTKKGKIRKKKVLPEGLISCAVDLGMRKGTTGFGTLCKYKNGKPYILRSRNLWIRYKEEKGSHSGRWAEGPDLGHIAKHKREIRFLRRKRGKPIKGEKSHIKLQQHIDDMGEDRFKKAARAIVNFALNTENVAGKNGIYPRADILLLENLEGLIPDAERERGINRALAGWNRRHLVERIKEMAEDAGFRRRVFEIPPYGTSQVCSKCGSLGRRYTLGINEETGKREIHFGYVEKLFACPNCGYCANADHNASVNLHRRFLIDDALKNYYEFKKLPEKKQKEAIAAIENSLKEKLSTIHKI

SEQ ID NO: 339 - protein, 785 aa, Unknown
  Description of Unknown: hydrothermal vent metagenome sequence
MLVLPHGAHGAASSIICPFGIKNISAKWDSPEYHGQTYYIMPIMKRRVIQAKISDTDPDTRQKIHLTHQIFNEYVKQTIKLFLSIMNGTYDHPAYKTNKELYRRWMASIIFAGSGGGSINYDYLINSICKTKSKRHWEGASIPEKVTIPTVNQITDQKGKKTAKIEKEEHDFKSFSSVDQIVELAKQQIYLFDKSEAFPLPSQIISAVISEAIAIIKQHRTLITKWYEDNGDFETEQAEFLNSPRYKSFLKIKYIFDAFEQENKLRAERKRSQRKRSLRWERWDKYVNLLIDNSELMQWREKNTTLTIPPALNDPAKNKKSRLGILLRANPELGALHRTYVETWKDIPPQRPTFCWPDINEHPRFFTASSPPTSPYAYQRLSIDHKKSKATVEFFLLDGKRDKNGRYIGNFYLLRVVFDPRINRFEHNPNAITKKGNKKPNSYYFLDPRTKKKREAHIKGCMLFLKKQKTSNHTSAYLTFNYAIERSNISEQAKKVRYDEKAKGWKAPIGAIVASVDMMYKEIAFVTIAEKIKPQEFTILASRKIKLHRNQDNGFKGPQAKQIEQHQISLRDRKRNLPRKQYPQKLQNHLNNMREEFSKRSARRILDFVMNLNKTIKDSQDKIIEQVDVILLERLKGLKPQKKNPRGLNRVLSNKRRPKVVTAIQEGCEIAGISCREIMPHYTSQICSKCGKLGRRFYENRKDVHEVERKMSPFGGKLFICPHCGYQANAEFNATINLLNIVLLNKRMTPEDKTNLSPAEKRNYYTQLDDLAMKKLSPQKSPVKV

SEQ ID NO: 340 - protein, 742 aa, Unknown
  Description of Unknown: hydrothermal vent metagenome sequence
MKRRVIQAKISDTDPDTRQKIHLTHQIFNEYVKQTIKLFLSIMNGTYDHPAYKTNKELYRRWMASIIFAGSGGGSINYDYLINSICKTKSKRHWEGASIPEKVTIPTVNQITDQKGKKTAKIEKEEHDFKSFSSVDQIVELAKQQIYLFDKSEAFPLPSQIISAVISEAIAIIKQHRTLITKWYEDNGDFETEQAEFLNSPRYKSFLKIKYIFDAFEQENKLRAERKRSQRKRSLRWERWDKYVNLLIDNSELMQWREKNTTLTIPPALNDPAKNKKSRLGILLRANPELGALHRTYVETWKDIPPQRPTFCWPDINEHPRFFTASSPPTSPYAYQRLSIDHKKSKATVEFFLLDGKRDKNGRYIGNFYLLRVVFDPRINRFEHNPNAITKKGNKKPNSYYFLDPRTKKKREAHIKGCMLFLKKQKTSNHTSAYLTFNYAIERSNISEQAKKVRYDEKAKGWKAPIGAIVASVDMMYKEIAFVTIAEKIKPQEFTILASRKIKLHRNQDNGFKGPQAKQIEQHQISLRDRKRNLPRKQYPQKLQNHLNNMREEFSKRSARRILDFVMNLNKTIKDSQDKIIEQVDVILLERLKGLKPQKKNPRGLNRVLSNKRRPKVVTAIQEGCEIAGISCREIMPHYTSQICSKCGKLGRRFYENRKDVHEVERKMSPFGGKLFICPHCGYQANAEFNATINLLNIVLLNKRMTPEDKTNLSPAEKRNYYTQLDDLAMKKLSPQKSPVKV

SEQ ID NO: 341 - protein, 674 aa, Unknown
  Description of Unknown: lab enrichment-defined media-ionic liquid and high solid enriched sequence
MGVKAWKAKIIVADPDLAAALDHTVRQWNLWAEQACIAIMRLRRGDYGDEGQAVWRFLSEKGTFGTSILDKITRVTGRGIKNDEERTIASNFLSRHGPFEPLRAARDALGPNFWYQFQRAVRERIESHDAKLRQWREDHAEWIETRRTWEEEHRAYMNVRPVIEAFEAAEGQSGRRRGRWRRWLDFLSSHPELAAWRGGPATIVPLSKEELAACRRRRRRAVAEQARLFFEKNPELRALNREHDEYQEKFARPWAKRRNPDGFRHRPTFTLPHPDSHPDWPRFKGNAGWRDLSVPDRTVSLELLCPDGSRRWFNVRFVPDPRLASLRPATQPVRQGNTTYHYVSDAIGVAEQPVQPQGIKLILRPDGAYLSVSVSVLAPPCGFDVRQSAIEKYGSIWACRKYKQDHPDRPLVTCAVDLAVRHNGALTVARDGEVFARRLLHNRFFLPGDDRERAMNIPSLLEIAAVKRQLRRARRQTGRIAPGKPSCARLQAHYRALCEDRYKKLVAAIFAYARHHGAEVVIFEDLKNLLPNAVNERGVNRALQSWNRGAIVRFARQSAEDVGLRVATVPAFHTSIVCARCGALGCRFEQTREGVRIAKLGPWFGCRACGRRIHADLNASENLHKVLIGTFPQVRRISRDPPVLSIADVRVDQREADRLAAAWLSELSVGPTPF

SEQ ID NO: 342 - protein, 638 aa, Unknown
  Description of Unknown: lab enrichment-defined media-ionic liquid and high solid enriched sequence
MRRGDFGPEGQAIWEHLKKTPHNFHVLYPISNGSGIEKTTRYYPDARAFVNKYGYGALGPVRSASGCLWKQLTKAVRERTHSYDKTCEKWSEEHSKWLEERAKWEAEHPEYMAIRPLIDTFHAKHGVTRGRRNRWALWLQFLMETPELVRWRNKTAKVVPLTDSELKRIRSKRRGAARREQALFYEKNPELAELNRIHGIYERRFARSAAKRKNPDGFRHRPTFTLPSEAKYPDWPRFQAGEGWRDLDLDRRTICLKLPTDGGSARWVQVHFVPDPRLQRLARLKQPVKEGATRYDYSLDMPSGHTVLAQPQEVRLIRRGSSYFATIRLSLHSAPSAIPVPQTAASSPAGMLRKIRTDAPELKLITCAVDLGVRHLGAATIAREGEIIGRRILHNRFLAPGADGGVINIPSLPQIAQVRRQIRCAQRRSGRISPKVAGCRHLWTHYRHLCEDRYKKAVAAIFGFARAHGAHIVLFEDLKMLNPDSANERGVNRALQNWNRGRIVEFAKNTAEDAGLCVVTVPAYWTSRICARCNAFGVRFNQGQRRKPGDDGHVSRVACELDFLGHWFLCPSCGRSVHADLNASENLHRVFLGTFPTVQTIQRQPRIYEINGQRVALDEIQQRAVEILASRRAGDTPF

SEQ ID NO: 343 - protein, 784 aa, Unknown
  Description of Unknown: permafrost metagenome or Phycisphaerales bacterium or terrestrial-soil-fen sequence
MGVRALRARIECDRETLLHLWRTHCAFNQRLLSILTKLFGMRRGELGETAARRALYQRVARFLLARDSKDAPYLLNSVSIQGWKPATALKMKVRMPAPDGTLAEVSADTWAPEAAKLSAHGTLAYDKEAVRDGLPDSLFQPMLRDAVAYISGHIELARNWEAEHADWLKAKAEWEEKDEHKKYLALRPRFDAFEQSVGGKAGKRRERWHLYLTWLRENPALAAWRGGPPAVHPLDAKATARVAKAKPWKKRSVEADEFWKANPELRELDKLHGYYEREFVRRRKTKKNPDGFDHRPTFTLPHAVLHPRWTLFNAPQTSPQGYADLRLPQRPGTLGSVKLRLLTGEKAPDGCPNEWVGVQFRADPRLSQFAERAEAQEIRKGKKKGTQKTVRVFRFVDQQLNCERPAQISGAKLIFKNVKLNDDGSLKSATPYLVFACTIDNLPLTEHARAIQWSETGEVTKTGKKRKAKKLPTGLVTCAVDLGLRNLAFLTLATSGEGPQNNTHDGIRVLRSRNQWLALEETAGTHPGRWSAGPDLAHIAAHKREIRRLRRLRGKPVKGQQSHVELQGHIDHMGQDRFKKAARAIVNFALNVDRAAGQSGQPYPRADLLIVEKLEGFIPDAARERGINRALVAWNRGQLVTRIKEVAADAGLKLFPVHPAGTSQCCSRCGALGRRYSIVRDQQTGVPAIRFGWVEKLFACPNRECPGRAPDKPDQPFTCNADHNASLNLHRRFVLDDRAVAAFFAWKNKTNAERERELTQMDQALRPELEKLHRLPLAELATPF

SEQ ID NO: 344 - protein, 722 aa, Unknown
  Description of Unknown: permafrost metagenome sequence
MKRGDSGTTDAQKHLYSQIARFVLARSSRDAPYLMNSISIRGWTPNTAKKKMKATLMGPDGQEVETSGDDWADAAAALSAEGTLLYDKSELLGDVPDTLRQVVVRECAAIISGHEELVRAWELSHEEWLEQKAKWESDPEHERYMVLRPQFETFEQSVGGKAGKRRGRWQRYLDWLRSNPELAAWRGGPATVVELPAAARERVRKARPSKVRSVEAEEFWKVNPELFELDRLHGFYEREFVRRRKTKKHPDGFDHRPTFTLPDPVRHPRWFVFNAPQTSPQGYRKLSLPKKNGDFGTIELLLLTGEKTDAKYPNGWNQVRFAADPRLSDFKQISKKRQIRKGKTKGQETDSNAFTFLDRQISMERPAQISGAKLLFKKVRLKSDGALLSADPYLVFTCNITDVPFTDAARAIKWEDAGERRKRAVIPAGLITCAVDLGIRHVGFATIAAKDEAHPEGLRVLRSRNVWMGHEEQKGRHPGRWSPGPELPHLASHKRSLRRLRRLRGKPVKDESSHAELQGHITNMANDRFKKAAREIVNFALNVERKVDPRTGEPYSRADLLVVENLANLIPDSERERGINRALIEFNRGHLVDRIAEVAKDCGLKLMKVSPVGTSQVCCRCGALGRRYSIQRDRDSGYADIRFGFVEALFACPHCGYRANADHNASINLHRRFLLGEAAIRGFKEWQQGSRQERADTVRRIEESLVAPLRLMHRLEVADMPF

SEQ ID NO: 345 - protein, 762 aa, Unknown
  Description of Unknown: permafrost metagenome sequence
MSTRAIQSRIQCDHQTLEHLWRTHVVFNRRLPPLISLLFRMKRGDSGTTDAQKHLYSQIARFVLARSSRDAPYLMNSISIRGWTPNTAKKKMKATLMGPDGQEVETSGDDWADAAAALSAEGTLLYDKSELLGDVPDTLRQVVVRECAAIISGHEELVRAWELSHEEWLEQKAKWESDPEHERYMVLRPQFETFEQSVGGKAGKRRGRWQRYLDWLRSNPELAAWRGGPATVVELPAAARERVRKARPSKVRSVEAEEFWKVNPELFELDRLHGFYEREFVRRRKTKKHPDGFDHRPTFTLPDPVRHPRWFVFNAPQTSPQGYRKLSLPKKNGDFGTIELLLLTGEKTDAKYPNGWNQVRFAADPRLSDFKQISKKRQIRKGKTKGQETDSNAFTFLDRQISMERPAQISGAKLLFKKVRLKSDGALLSADPYLVFTCNITDVPFTDAARAIKWEDAGERRKRAVIPAGLITCAVDLGIRHVGFATIAAKDEAHPEGLRVLRSRNVWMGHEEQKGRHPGRWSPGPELPHLASHKRSLRRLRRLRGKPVKDESSHAELQGHITNMANDRFKKAAREIVNFALNVERKVDPRTGEPYSRADLLVVENLANLIPDSERERGINRALIEFNRGHLVDRIAEVAKDCGLKLMKVSPVGTSQVCCRCGALGRRYSIQRDRDSGYADIRFGFVEALFACPHCGYRANADHNASINLHRRFLLGEAAIRGFKEWQQGSRQERADTVRRIEESLVAPLRLMHRLEVADMPF

SEQ ID NO: 346 - protein, 735 aa, Unknown
  Description of Unknown: permafrost metagenome or terrestrial-soil-fen sequence
MFNRRLPDLISLLFRMRRGECGETEQASRLYSQVASFILARGSKDAPYLLNSVSVRGWKPHTAKKMKARALGPDGQQIELAGEDWADPAAALSAEGRLLYDKTELLGDVPDTLRQMAARECVAIISGHEELVRAWEKAHEEWLASKAKWESDPENQFYLGLRARFDEFEQSVGGKVGKRRGRWQRYLDWLRANPDLAAWRGGPAAVVELSAGAKERIRKAKPRKVRSVEAEEFWKVNSELAALDRLHGYYEREFVRRRKTKKHPDGFDHRPTFTLPHPVRHPRWFVFNAPQTSPQGYRKLCLPSSGGHTGTVELLLLTGEKADNKYPSGWETVRFAADPRLSDFKAITKRRQVLKGKTKGQETDTKAFTFLDRQINLERPAQISGVKLIFKGVRQNHDGSLLSAHPYLVFTCNVADVPLTDGAKKIKWEDTGERRKRVVVPAGLIACAVDLGIRHVGFATVATQDAESGGLHVLRSRNIWIGQEEEKGRNPGRWSPGPDLAHLSAHKRSLRHLRGLRGKPVKGENSHIELQDHITNMASDRFKKAAREIVNFALNADSKVDPRTGEPYPRADVLVLENLANLLPDSERERGINRALIEFNRGHLADRIVEVAKDCGLKVMMVSPVGTSQVCCRCGALGRRYSLRRHQDGGYTDIHFGFVEPLFACPSCGYRANSDHNASVNLHRRFRLGEAAIAKFKEWQKGTKPERDEVLRRIEQSLVGPLREMHRLAVADTPF

SEQ ID NO: 347 - protein, 760 aa, Unknown
  Description of Unknown: permafrost metagenome or terrestrial-soil-fen sequence
MSTRALQSRIQCDHQTLEHLWRTHLVFNRRLPDLISLLFRMRRGECGETEQASRLYSQVASFILARGSKDAPYLLNSVSVRGWKPHTAKKMKARALGPDGQQIELAGEDWADPAAALSAEGRLLYDKTELLGDVPDTLRQMAARECVAIISGHEELVRAWEKAHEEWLASKAKWESDPENQFYLGLRARFDEFEQSVGGKVGKRRGRWQRYLDWLRANPDLAAWRGGPAAVVELSAGAKERIRKAKPRKVRSVEAEEFWKVNSELAALDRLHGYYEREFVRRRKTKKHPDGFDHRPTFTLPHPVRHPRWFVFNAPQTSPQGYRKLCLPSSGGHTGTVELLLLTGEKADNKYPSGWETVRFAADPRLSDFKAITKRRQVLKGKTKGQETDTKAFTFLDRQINLERPAQISGVKLIFKGVRQNHDGSLLSAHPYLVFTCNVADVPLTDGAKKIKWEDTGERRKRVVVPAGLIACAVDLGIRHVGFATVATQDAESGGLHVLRSRNIWIGQEEEKGRNPGRWSPGPDLAHLSAHKRSLRHLRGLRGKPVKGENSHIELQDHITNMASDRFKKAAREIVNFALNADSKVDPRTGEPYPRADVLVLENLANLLPDSERERGINRALIEFNRGHLADRIVEVAKDCGLKVMMVSPVGTSQVCCRCGALGRRYSLRRHQDGGYTDIHFGFVEPLFACPSCGYRANSDHNASVNLHRRFRLGEAAIAKFKEWQKGTKPERDEVLRRIEQSLVGPLREMHRLAVADTPF

SEQ ID NO: 348 - protein, 747 aa, Unknown
  Description of Unknown: Phycisphaerae bacterium ST-NAGAB-D1 sequence
MATKSYRARILTDSRLAAALDRTHVVFVESLKQMINTYLRMQNGKFGPDHKKLAQIMLSRSNTFAHGVMDQITRDQPTSTLDEEWTDLARRIHKTTGPLFLQAERFATVKNRAIHTKSRGKVIPSPETLAVPAKFWHQVCDSASAYIRSNRELMQQWRKDRAAWLKDKNEWQQKHPEFMQFYNGPYQNFLKLCDDDRITSQLAAEQQPTASKNNRPRKTGKRFARWHLWYKWLSENPEIIEWRNKASASDFKTVTDDVRKQIITKYPQQNKYITRLLDWLEDNNPELKTLENLRRTYVKKFDSFKRPPTLTLPSPYRHPYWFTMELDQFYKKADFENGTIQLLLIDEDDDGNWFFNWMPASLKPDPRLVPSWRAETFETEGRFPPYLGGKIGKKLSRPAPTDAERKAGIAGAKLMIKNNRSELLFTVFEQDCPPRVKWAKTKNRKCPADNAFSSDGKTRKPLRILSIDLGIRHIGAFALTQGTRNDSAWQTESLKKGIINSPSIPPLRQVRRHDYDLKRKRRRHGKPVKGQRSNANLQAHRTNMAQDRFKKGASAIVSLAREHSADLILFENLHSLKFSAFDERWMNRQLRDMNRRHIVELVSEQAPEFGITVKDDINPWMTSRICSNCNLPGFRFSMKKKNPYREKLPREKCTDFGYPVWEPGGHLFRCPHCDHRVNADINAAANLANKFFGLGYWNNGLKYDAETKTFTVHTDKKTPPLIFKPRPQFDLWADSVKTRKQLGPDPF

SEQ ID NO: 349 - protein, 743 aa, Unknown
  Description of Unknown: Planctomycetes bacterium RBG_13_46_10 sequence
MSVRSFQARVECDKQTMEHLWRTHKVFNERLPEIIKILFKMKRGECGQNDKQKSLYKSISQSILEANAQNADYLLNSVSIKGWKPGTAKKYRNASFTWADDAAKLSSQGIHVYDKKQVLGDLPGMMSQMVCRQSVEAISGHIELTKKWEKEHNEWLKEKEKWESEDEHKKYLDLREKFEQFEQSIGGKITKRRGRWHLYLKWLSDNPDFAAWRGNKAVINPLSEKAQIRINKAKPNKKNSVERDEFFKANPEMKALDNLHGYYERNFVRRRKTKKNPDGFDHKPTFTLPHPTIHPRWFVFNKPKTNPEGYRKLILPKKAGDLGSLEMRLLTGEKNKGNYPDDWISVKFKADPRLSLIRPVKGRRVVRKGKEQGQTKETDSYEFFDKHLKKWRPAKLSGVKLIFPDKTPKAAYLYFTCDIPDEPLTETAKKIQWLETGDVTKKGKKRKKKVLPHGLVSCAVDLSMRRGTTGFATLCRYENGKIHILRSRNLWVGYKEGKGCHPYRWTEGPDLGHIAKHKREIRILRSKRGKPVKGEESHIDLQKHIDYMGEDRFKKAARTIVNFALNTENAASKNGFYPRADVLLLENLEGLIPDAEKERGINRALAGWNRRHLVERVIEMAKDAGFKRRVFEIPPYGTSQVCSKCGALGRRYSIIRENNRREIRFGYVEKLFACPNCGYCANADHNASVNLNRRFLIEDSFKSYYDWKRLSEKKQKEEIETIESKLMDKLCAMHKISRGSISK

SEQ ID NO: 350 - protein, 792 aa, Unknown
  Description of Unknown: sediment metagenome sequence
MATKSFEAKIVCKPDEKYTAEQKKQFLWFTHQVFNDGVRKVIPYVFKMKRGELGPEFQAIYYAITSSQDAIGKLEAVINPDWTSGKIGKSDPNKWKELLKYQELEKGFRQRLKEEGIKSTKKFRKELEDEKKKLAKEIGQKDIWADAAAILRNKNLLLFNRDELLPNLPSEFRRKIYEMTIQLIHGHQELVANWEDEHAEWLIEKDKWEEEHPEYMNVRPIFEKFEKEQGKVKGSRIRWLAYLDFLSSKPELANWRGKAKETIPLTKEERAGFRKPGQHFAAFFNKNPELQELDRLHKEYQEKFARTQSKRTPHPDGFKHRPTFTLPDAMRHPVWYSFKGATDPTKGSTYRNLDLENCTLDLKVLTAMEGEGRNPGGMIQYAFEPDERIKGFRYVGTTEKGKRAKGYIYYDPILEKERPAKIQGIKLVFRPPRPDGTAYLIFSCQIEDEKPKIKIWKDKEEESPGEITKRKKTEVYPPELITLAIDFGQRHLGAITICKNNNGRPEPIRFIPAYPKRRKDRESKPVSAWLAKIPGLTFNAVGMHEKEISAGMSRRFQDPKSIRQAGEKEGRKSKGQHIPETETPWAHLREHIANMKEDHYKKAANLIIRTALQNGAQVILIENLRNYRPMLERTNLENRRRMQWAVRQTAKFLEDTARPLGLIVRQVSSAYTSRFCSSCGHPGARVSLPGQKNWEKFYAEKYGKERKMIAVAGGQFFCCPACKKIINADINASLNMHKVFYQNFIWPEKIDKKDTKNFIWQGKNYNWDQIADDVQSFLDQKAGIKKEDDIPY

SEQ ID NO: 351 - protein, 754 aa, Unknown
  Description of Unknown: soil metagenome sequence
MGVRAIKSKIICDKVVLTHLWRTHKVFNERLPLIISLLFKMRRGEAGETPERQDLYRRIAEFILMRSSKDAPYLFNSICIRNWKPNSAKGYKVRLIDDGGVATETSGESWAEEAARLSAEGHLLYDKDDMVGDLPALLQQMVFRDSVSIISGHDGLVDLWKKDHAEWLKRKADWEGREENKKYITMRPKFEEFEAAVGGKIGKRRGRWHLYHEWLRENPDLAGWRGGPPVVNPISTAGKKRIARAAPSKKMSVEFEEFWKANPELQALDRLHGYYEREFVRRRKRKRNPDGFDHRPTFTLPHPVRHPRWLVFNAPQTNPVGYRNLILPTARSLRGSVELQLVTGEKTEERYPHAWVPVGFKADPRLGDLRRVTAKSVYRKGKDKGKEKEVEAYEFLDRHLNRYRKAALSGAKLIFRLSPGGSPKEAYLYFTLEVANEPLTDKAKAIKWTETGEVTKRGKARKRKTVSEGLVTCAVDLGIRNLGFATLAEYVDGVPRILRSRNLWIGIEEEGGAHPGRWSEGPTLHHISEHKAKIRSLRRLRGKPVKGEESHLELQSHITSMGEDRFKRSARAIINFALNAKKEAGKKGAYPRADVLLLERLEGMIPDAERGRGINRALMAWNRGQLVEQVKEVARDAGLKVFEIHPIGTSQVCSKCGSLGRRYSIGRNKEDGEKEITFGWVEKLFACPCGYTANADHNASVNLHRRFLFDDGAIPGFLEWSKRDKSGREAMVARIEAALEPRLRAMHGLEPISV

SEQ ID NO: 352 - protein, 767 aa, Unknown
  Description of Unknown: soil metagenome sequence
MAVRAIQARLESDKNMLEHLWRTHKVFNERLPRIISILFKMRRGEYGTTDEDRALYKSIAKFVLGRNARDAPYLLNSISIKNWTPSTAKKMKVTITTSDGSEQEVYGDTWANKAAELSSAGRLLYDKEEVLGDLPDSLRQIVVRECVAIISGHDELVKNWDKAHTEWLKKKEEWEAKEEHKKYLAVRSHFDDFEKSVGGKAGKRRARWHKYLQWLRENPDLAGWRGGLAAVNELSKEAQERVRKAKPWRQRSVEAEEFWKANPELQALDRLHGQYERDFVRRRKTKRNPDGFEHRPTFTLPHFLRHPRWLVFNAPQTSPAGYRNLKLPGKVGQYGEVDLRLLTDEIRGAEFPVDWTRLRFLGDPRLADFKPVKIQKAATKGKVKGELRERPAYRFFDGELQMERPAQISGAKLIFKNVRLDDGSLQSATPYLYFTCEAESLQWTENARKVKWNATGEVMKKGKKRGYRTLPDGLIACAVDLGIRNLGFATLARYENGVPRLLRSRNLWIGHAEARGIHPGRWSEGPELAHLALHKRELRRLRSLRGDPIAGEESHIKLQQHITYFAEDRFKKAARAIVNFALNVKEFADKNTGEIYPRADVLVLENLGTLLPNAEREKGINRSLIEFNRGHLVDRVKELAKDVGLRVFEVSPVGTSQVCSRCGTLGRRYSIRRSAETHRPEIQFGFVEKLFACPECGYRANADHNASVNLHRRLAQVPGAFAQWEELGKDQQSKRKRWEEIEAKLLPSLQKMHGLDGAGKPHPFLSA

SEQ ID NO: 353 - protein, 767 aa, Unknown
  Description of Unknown: soil metagenome sequence
MAVRAIQARLESDKNMLEHLWRTHKVFNERLPRIISILFKMRRGEYGTTDEDRALYKSIAKFVLGRNARDAPYLLNSISIKNWTPSTAKKMKVTITTSDGSEQEVYGDTWANKAAELSSAGRLLYDKEEVLGDLPDSLRQIVVRECVAIISGHDELVKNWDKAHTEWLKKKEEWEAKEEHKKYLAVRSHFDDFEKSVGGKAGKRRARWHKYLQWLRENPDLAGWRGGLAAVNELSKEAQERVRKAKPWRQRSVEAEEFWKANPELQALDRLHGQYERDFVRRRKTKRNPDGFEHRPTFTLPHFLRHPRWLVFNAPQTSPAGYRNLKLPGKVGQYGEVDLRLLTDEIRGAEFPVDWTRLRFLGDPRLADFKPVKIQKAATKGKVKGELRERPAYRFFDGELQMERPAQISGAKLIFKNVRLDDGSLQSATPYLYFTCEAESLQWTENARKVKWNATGEVMKKGKKRGYRTLPDGLIACAVDLGIRNLGFATLARYENGVPRLLRSRNLWIGHAEARGIHPGRWSEGPELAHLALHKRELRRLRSLRGDPIAGEESHIKLQQHITYFAEDRFKKAARAIVNFALNVKEFADKNTGEIYPRADVLVLENLGTLLPNAEREKGINRSLIEFNRGHLVDRVKELAKDVGLRVFEVSPVGTSQVCSRCGTLGRRYSIRRSAETHRPEIQFGFVEKLFACPECGYRANADHNASVNLHRRLAQVPGAFAQWEELGKDQQSKRKRWEEIEAKLLPSLQKMHGFDGAGKPHPFLSA

SEQ ID NO: 354 - protein, 767 aa, Unknown
  Description of Unknown: soil metagenome or terrestrial-soil sequence
MAVRAIQVRLESDKTLLEHLWRTHKVFNERLPMIISILFKMRRGECGTTDEERTLYKNIARFVLARSSKDAPYLLNSISIKDWTPSTARKMKATITIPDGSEQEVCGDTWADKVAELSAAGRLLYSKQEVLGDLPDSLRQMIVRECVAIISGHDELVRNWDKSHTEWLKKREEWEAKEEHKKYLAVRSRFDEFEKSVGGKAGKRRARWHKYLQWLRESPDLAGWRGSLAVVNELSREAQERVRKAKPWRQRGVEAEEFWKANPELQALDRLHGQYERDFVRRGKTKRNPDGFEHRPTFTLPHFLRHPRWLVFNAPQTSPPGYRNLKLPGKAGQYGEVELRLLTNEIRGAEFPIDWTTLRFLGDPRLADFKPVKIQKAATKGKVKGELRGRPAYRFFDRELQMERPAQISGAKLIFKNVRLDDGPLQSATPYLYFACEAKSLRWTENARKVKWNATGEVTKKGKKRGYRTLPDGLIACAVDLGIRNLGFATLARYENGVPRLLRSRNLWIGHAETRGRHPGRWCEGPELAHLALHKRELRRLRSLRGDPIAGEESHIELQQHITHFAEDRFKKAARAIVNFALNVKEFADKNTGEIYPRADVLVLENLGSLLPDAEREKGINRSLIEFNRGHLVDRVKEVAKDVGLRVFEVSPVGTSQVCSRCGTLGRRYSIRRSAETHRPEIQFGFVEKLFACPECGYRANADHNASVNLHRRLAQVPGAFAQWEELGKDQQRKRKRWEEIEAKLLPSLQKMHGFDGAGKPHPFLSA

SEQ ID NO: 355 - protein, 669 aa, Unknown
  Description of Unknown: soil metagenome or terrestrial-soil sequence
MCESPQQRAFLELTHRLFNESLRPLVPLLYAARKGRHGPDYQQILSTIKSGQGASAQVEAVSSLAARPGSRGGKEWTDLAKELVARGQILFDRHALMPNVHKEFRRKVFEMAFQIILSHDAKMKQWRTDHAKWLREKAEWERSYPEYLAVRPVIQEFEAREGQAGKRRGRWHRWLDFLVLYPQLAAWRGGEPTVRQLTQQELQEARRSRRRAVPNTIDAFFAKNPELKELHGLHGEYQARFVRPWAKRRHQDGFFLPPTFTLPSADRHPAWYSFKRGDTYRNLSLEQRTIELRVLKSADPNESGRHAYVQYQFVGDNRLGKLSPASKIVRSGRFPCDLLVWDEGSDHARPARVQGAKLVIRKGQAYLYFSVYIEDAPSRLPVKQAQIDKYSPGWSINRIRGEPYDPPLRTMAIDLGIRHIAAATVMENGNVLATRFLHSRPVSRVSGHVIEGIPTLPQISEMKQRLRRARRKFGKPLKGTMSCRRIQRHVTSMSEDRCKKSASAIVDFGRAHRVDIILMERLEGLVPDAARERRINCGLINWNRGHLASWIRIIAEPYGIRVLELPPRWTSQVCSHCGSIGARFTCTRGEMKISAGGKLFGCPTCAFEANADFNASLNLQRVFWGLFPQVSKAGRGRVQCNDRVIELASVNQAWENHWLRKHNSANDVF

SEQ ID NO: 356 - protein, 744 aa, Unknown
  Description of Unknown: soil metagenome sequence
MAAKSYQPKMSTKSYPSKVICGKSEFDDLRRTHRVFNAGVRKLVDTYIAMKKGAYGQTAVEIAMYLLGKKGSKGHDLMNPLTAEDAKDTLDTEGMKLVRQYRRESGILFSRYEKIYEIDGKAVCAGSAKKGDSKGKLVISSIFWHFICNQAIEYLRSNNELMQAWRDDRRKWLEEKQKFFDENAGFREFVQGYLADFDAHAEKMRQEFQTQAGQRAYLRKRNKSDSGKRFSRWHLWYEWICSHPEILEWRGRAKAADFVLLTPDEVHEVEKQFPKRQDRRTGKMLDMLRRKNPELDEIEKLRKTYTNDFARFRRPPTLTLPSADKHPCWCRLEKDKLYRKADFEKGTIELCVVCKDETDGEYDMKWRTFRLKPDPRLQPSHRAKAFAAEGRYPPYKEGKVGNTLNRPAESPDKRLAGLKGAKLILKRNDNAQIVFTVVEQNEPLKAKFSKKEGAKSSADRLEILDGKEATRVMAVDLGARHVGAYVITEGKRSSDVWRLEHLKKAFVDSPDLPDLRSITQHDWQLRKARRKRGKPVKNQRSFISLQDHRTKMSDDRFKKAANVIVENARRHSVHIIVFEDLRDLKPTAYNERWLNRQVRGMNHRHIFDFTKKMAAEFGINVTDVRAYNTSRLCSKCGFPGYRFSMKQKSPYREKAPRKGCSDFGYPVWDSGGHLFRCPHCGYRVQADLNAAANIAQRFFGSLMEWKCKDYRYSNAMHPSFDARKDFDKWASDVQRRKSMPDAPF

SEQ ID NO: 357 - protein, 740 aa, Unknown
  Description of Unknown: soil metagenome or terrestrial-soil sequence
MATKTYYARFVNTTPRLRAALERSHYVYVECLRQMIERYIAMRKGKLGEECRQLAKIILTTGNTEAHGIMNQITRPVVTSGKDYEWVKLAKQVHKLRGPLLLQDEGFARVDGVTIRTKHHGKVEPTRGELAVTAKFWMQICDMASSFLKSNAELMDDWREERTKWLREKAEWEERNSDFLKFWNGPYTEFENLYERMRLEAQTAAGQTPTVRKRQSRERGKRIDRWHLWYEWVISHPEIMAWRNQARASDFKVMPIELQNQIKRKHPRQNKYIPEFLKWLRENNAEFDRLDSLRRVYVNNYCRFKRPPTLTLPSPKKHPYWFTFERDEFYKDADFETGAIRLLLIDQKDDGAWFFEWFDAQMKCDPRLKPSVRAEHFNKEGRYPPYIDGKPARKLNRSAASPEQRRAGYTGAKLVLKGARQELLFTVIEQDCPPKVKWQKVKMRACRADNAFSAEGERIPLKIMAIDLGIRHTAAYVIAEGTLQDGQWHLSWQKKGIVRDIHISPLMNIRQHDWELREGRSRQGKAAKGERTFVDLQDHRTDMADDRFKKAANTIVETAREHDVRLILFEQLKNWFPKAFDERWMNRQLRDMNRRKIVEMVEGQSKEFGIICADNISPWLTSRICSRCYKPGWRFSIKGKDPYKEKLSRRHCQDFGYPIWDRGGGHLFRCSHCGYRANADINAAGNVAAKFFGAWPVLSCKKGVYTWQQDGQKHTFDARETFESWAQDVRRRKQIAESPF

SEQ ID NO: 358 - protein, 706 aa, Unknown
  Description of Unknown: soil metagenome or terrestrial-soil sequence
MIERYIAMRKGKLGEECRQLAKIILTTGNTEAHGIMNQITRPVVTSGKDYEWVKLAKQVHKLRGPLLLQDEGFARVDGVTIRTKHHGKVEPTRGELAVTAKFWMQICDMASSFLKSNAELMDDWREERTKWLREKAEWEERNSDFLKFWNGPYTEFENLYERMRLEAQTAAGQTPTVRKRQSRERGKRIDRWHLWYEWVISHPEIMAWRNQARASDFKVMPIELQNQIKRKHPRQNKYIPEFLKWLRENNAEFDRLDSLRRVYVNNYCRFKRPPTLTLPSPKKHPYWFTFERDEFYKDADFETGAIRLLLIDQKDDGAWFFEWFDAQMKCDPRLKPSVRAEHFNKEGRYPPYIDGKPARKLNRSAASPEQRRAGYTGAKLVLKGARQELLFTVIEQDCPPKVKWQKVKMRACRADNAFSAEGERIPLKIMAIDLGIRHTAAYVIAEGTLQDGQWHLSWQKKGIVRDIHISPLMNIRQHDWELREGRSRQGKAAKGERTFVDLQDHRTDMADDRFKKAANTIVETAREHDVRLILFEQLKNWFPKAFDERWMNRQLRDMNRRKIVEMVEGQSKEFGIICADNISPWLTSRICSRCYKPGWRFSIKGKDPYKEKLSRRHCQDFGYPIWDRGGGHLFRCSHCGYRANADINAAGNVAAKFFGAWPVLSCKKGVYTWQQDGQKHTFDARETFESWAQDVRRRKQIAESPF

SEQ ID NO: 359 - protein, 758 aa, Unknown
  Description of Unknown: terrestrial metagenome sequence
MAVKTLQSRLHCKPKKLEALWRTHEIFNERLKDVLSLLFRMRRGECGRSPDERELYREIALFITACPANNAPYLLNSVCIQNWVPTTARKIKAIVSRSSGELIKGTEESWTTRAAQLSAKGHLLFDKREVLGDLTPAMAQVIVREAAAYLSNYESHVRRWEREHEQWLGEKAAWEAEPEHQLYLASRPRFTAFEAGIGGRLTERRHRWAQYLTWLSQNPELAAWRGGLATINPIGEEGRKRIAHAPRWRKAQVEAEEFFKLNPELKDLDALHGYYERKFVRRRKTKRHIDGFDHKPTFTQPDALVHPHWYLFNGPQTKPAGYRKLILPKSSKQAGSIELSLMTCDKNDPNDTAWVPFRFHGDCRMSNFRSVVVTSKIKSGGKRGQTKEKEGYEMYDPALKTWRPAEIKGARLIFTVKGKRPRAAYLYFTIKTKNTPFSEAARNIEWSETGETSVFGPPRKTKLVPEGLVTCAAHIGARDCVYATLAVGDGSTPHIIRQRNLWIEHIEATGQHVGRRHRGPSLAHLASHKMELSRRRSQMGRIPRGETAHEGLQSHITNMAKDRYRQQARRIFDFALNVEGVGDPRAGKSYPRADVLILESMENLIPNVERERGVNKALVAFNRAHLVSHLKEIVAEAGVMVFEISPVGTSQVCSRCGALGRPYSVRRRSKDHPVAITFGPAEPLFACPSCHYRANSSHNASVNLHHRFYSDQALESFITYLRQPVERKLENLRRIEAELISPIAGPLSLYEMHGIKIG

SEQ ID NO: 360 - protein, 691 aa, Unknown
  Description of Unknown: terrestrial-soil sequence
MIQGTTSCASPTIAVKCFQAKLVCESPQQRAFLELTHRLFNESLRPLVPLLYAARKGRHGPDYQQILSTIKSGQGASAQVEAVSSLAARPGSRGGKEWTDLAKELVARGQILFDRHALMPNVHKEFRRKVFEMAFQIILSHDAKMKQWRTDHAKWLREKAEWERSYPEYLAVRPVIQEFEAREGQAGKRRGRWHRWLDFLVLYPQLAAWRGGEPTVRQLTQQELQEARRSRRRAVPNTIDAFFAKNPELKELHGLHGEYQARFVRPWAKRRHQDGFFLPPTFTLPSADRHPAWYSFKRGDTYRNLSLEQRTIELRVLKSADPNESGRHAYVQYQFVGDNRLGKLSPASKIVRSGRFPCDLLVWDEGSDHARPARVQGAKLVIRKGQAYLYFSVYIEDAPSRLPVKQAQIDKYSPGWSINRIRGEPYDPPLRTMAIDLGIRHIAAATVMENGNVLATRFLHSRPVSRVSGHVIEGIPTLPQISEMKQRLRRARRKFGKPLKGTMSCRRIQRHVTSMSEDRCKKSASAIVDFGRAHRVDIILMERLEGLVPDAARERRINCGLINWNRGHLASWIRIIAEPYGIRVLELPPRWTSQVCSHCGSIGARFTCTRGEMKISAGGKLFGCPTCAFEANADFNASLNLQRVFWGLFPQVSKAGRGRVQCNDRVIELASVNQAWENHWLRKHNSANDVF

SEQ ID NO: 361 - protein, 698 aa, Unknown
  Description of Unknown: terrestrial-soil sequence
MGVKAWKVKLFVDAPEKQAVLDDTLQQWNLYAAHVCKVLLAFRRNDYGDVGLEVWRQLAKTPQNYHVLYCITPRSDAAPDQGPRVTREKDYHRAARAFVQRHGYEPELAAVRRDAGPLWKQIVKAARERVLSYEQKVADWREAHEQWIVQRREWEGDNPPYMAVRPVIEAFQRDHGATRGRRVRWRKWQAFLQSTPELAAWRGGAACVEPLSAQELRHAARNRRKAARRERELFLDKNPELAELDRVHFQYERLFARTAAKRRNPDGFRHRPTFTLPSLPNRPDWPRFQAMEGYKNLDITSRSVQLRLPTSDTRHWLSLSFVPDPRLARLVPLERSVKEGRTRFDYRFPNRPGEFVLAQPQEIRLIRRGSSYFATIRLTLQPTPSPLPLTQTAAGKYSPQWVIRKIRDDAPDLSLVTCAVDLAVRHLGAASVAREGRVFARRILHNRFFRPNDLRERALNIPSLPEIAAVRRRIRRAQRRSGRMSPAKDTCRRLWTHYRNLCEDHYKKAVAAIFAYALHHGAHLVIFEDLKMLNPDSANERGVNNALQNWNRGNIVRFAKMAAEDHGLRVVTVGAWWTSRLCARCGGMGVRFNQGKRRPWGQRRHTAPRPVPIDRLTCNIAPLGHWFLCPGCRSCLHADINASENLHRQFLGSLPTVKRLGSSRPPIYEVNGQRVEQARLEAAANELLLARTAPATPF

SEQ ID NO: 362 - protein, 687 aa, Unknown
  Description of Unknown: terrestrial-soil-compost sequence
MGTKAWKAKLILDSEDARAALLHTFSVWNAACAEVCEALLAFRRGEFGEEGRRVWTYLRDAGTQGYYILWCITKAPRPREVKELHRIAADFVARHGFHQGLLAVRERLPSALWKQVIHAARERVASYEEKVAIWNEDHAQWLADRAEWEAEHASYMAVRPLIEQFQSQFGATRGRRARWHAWLTFLGSTPALQSWRGGPPGVVSLTSGERQAARRNPRKAVAREAELFYAKNPELAELNRIHGEYERRFARSWAKRKNPDGFRHRPTFTLPNEKSHPDWPRLQANEGWKALDPAARTIRLQLIAPDGTARLYPFRFVPDPRLSRLTPLAEPLKEGRITYAYSVPGPQGRPTPAQPQGIKVILRGDSAFISISLSLLPPPSAIPVTQAAMTKYPPTWALKQIREKAPELELVTCAVDLGVRHIGAATIAREGEVIARRILHHRFFPPGGDPARPINIPSLAEIAEVKRQLRRARRRSGKPAPGKESCRRLQAHYRGLCEDRYKKVVAAIFEFAAAHGAHIVIFEDLRMLNPDSANERGVNAALMNWNRGSIVRFARATAEDRGLRVATVGAWWTSRICCRCDALGVRFEQGRRREWARAPVASPAPPDRTACTISRLGQWFFCPACRRRVHADINASENLHRVFLGTFPKVERVGREPPAYEVGGQHVDFREIQRAAAAILSAPATPF

SEQ ID NO: 363 - protein, 768 aa, Unknown
  Description of Unknown: terrestrial-soil-hardwood forest soil sequence
MSVRAIQARINCDRQTLLDLWRTHCVFNQRLPSILSVLFKMRRGECGDSPELQDLYQRISRFIIASSSQLADALLNSVSIRNWKPDSARKRKIKVVSETGEIVEVTGETWADAAAAISKQGQLLYDKRALLFDLPNSMRQIVSREAVTIISGHDELTAIWHKEHAAWSKQKAEWQNGAENQRYLALRPKFAAFEEEVGGAITKRRGRWHLYLQWLPEHPELAAWRGGPAIVRKLDHAALLRVQRSRPSKQRTVEAEEFWKINPELKVLDRLHGDYESRFVRRRKTKKNSDGFDHRPTFTLPHPVNHPRWFVFNAPQTSPQGYGDLKLPAEPNGFGTISLRLLTGEKSEGGYPSNWRTVRFKADPRLADFRQVSVKYRTNKGASKGTEREKRGYIFVDRQLKLERKATISGAKLVFRDIRLNPDGSLSSATPYLIFTCNIDDELMTERAKAIKWSDTGEITKKGKPRKKKTLPSSLVSCAIDLGHRHLGFATIAQAEETGLRILRSRNLWIGHKETTGHHPGRWCEGPDLAHLGQHKRKLRALRRLRGKPVKDERTHVELQGHIDDMAEDRFKKGARAIINFALNTDNRIDEKTGKPIPRADVLLLENLENLIPDAERERGINRMLVQFNRGNLVKRVKEMAADAGLKVFEVSPFGTSQVCSKCGELGRRYSIRRQQVPEDPTQTRPDIHFGLVEKLFACPKCNYRANADHNASVNLHRRFHNDGLALKSFAEFRALSDQDRLRSIEQIDAKLLEPLRELHNVGPVTPF

SEQ ID NO: 364 - protein, 699 aa, Unknown
  Description of Unknown: terrestrial-soil-hardwood forest soil sequence
MADALLNSVSIRNWKPDSARKRKIKVVSETGEIVEVTGETWADAAAAISKQGQLLYDKRALLFDLPNSMRQIVSREAVTIISGHDELTAIWHKEHAAWSKQKAEWQNGAENQRYLALRPKFAAFEEEVGGAITKRRGRWHLYLQWLPEHPELAAWRGGPAIVRKLDHAALLRVQRSRPSKQRTVEAEEFWKINPELKVLDRLHGDYESRFVRRRKTKKNSDGFDHRPTFTLPHPVNHPRWFVFNAPQTSPQGYGDLKLPAEPNGFGTISLRLLTGEKSEGGYPSNWRTVRFKADPRLADFRQVSVKYRTNKGASKGTEREKRGYIFVDRQLKLERKATISGAKLVFRDIRLNPDGSLSSATPYLIFTCNIDDELMTERAKAIKWSDTGEITKKGKPRKKKTLPSSLVSCAIDLGHRHLGFATIAQAEETGLRILRSRNLWIGHKETTGHHPGRWCEGPDLAHLGQHKRKLRALRRLRGKPVKDERTHVELQGHIDDMAEDRFKKGARAIINFALNTDNRIDEKTGKPIPRADVLLLENLENLIPDAERERGINRMLVQFNRGNLVKRVKEMAADAGLKVFEVSPFGTSQVCSKCGELGRRYSIRRQQVPEDPTQTRPDIHFGLVEKLFACPKCNYRANADHNASVNLHRRFHNDGLALKSFAEFRALSDQDRLRSIEQIDAKLLEPLRELHNVGPVTPF

SEQ ID NO: 365-400 - skipped (36 entries)

SEQ ID NO: 401 - DNA, 37 bp, Artificial Sequence
  Description of Artificial Sequence: Synthetic oligonucleotide
cgtgcatcggccgacgaagagcgaaggtcagtgacag

SEQ ID NO: 402 - DNA, 37 bp, Artificial Sequence
  Description of Artificial Sequence: Synthetic oligonucleotide
cgccgcagcggccgacgcggccctgatcgatggacac

SEQ ID NO: 403 - DNA, 36 bp, Artificial Sequence
  Description of Artificial Sequence: Synthetic oligonucleotide
gccgcagcggccgacgcggccctgatcgatggacac

SEQ ID NO: 404 - DNA, 36 bp, Artificial Sequence
  Description of Artificial Sequence: Synthetic oligonucleotide
ggagcgccccccgacgcggcaatgatcggctgacac

SEQ ID NO: 405 - DNA, 36 bp, Artificial Sequence
  Description of Artificial Sequence: Synthetic oligonucleotide
ctctcaatggctaaagatctagttctaattggacac

SEQ ID NO: 406 - DNA, 30 bp, Artificial Sequence
  Description of Artificial Sequence: Synthetic oligonucleotide
ccccccccgccattctcggctgtgtacaac

SEQ ID NO: 407 - DNA, 38 bp, Artificial Sequence
  Description of Artificial Sequence: Synthetic oligonucleotide
cgggtgtaccccccccgccattctcggctgtgtacaac

SEQ ID NO: 408 - DNA, 38 bp, Artificial Sequence
  Description of Artificial Sequence: Synthetic oligonucleotide
tctctcaatggctaaagatctagttctaattggacacc

SEQ ID NO: 409 - DNA, 26 bp, Artificial Sequence
  Description of Artificial Sequence: Synthetic oligonucleotide
gcggcgctggccagcgccgcgctgaa

SEQ ID NO: 410 - DNA, 32 bp, Artificial Sequence
  Description of Artificial Sequence: Synthetic oligonucleotide
gttgcacctcgcgcgcacctgcgggttgacac

SEQ ID NO: 411 - DNA, 36 bp, Artificial Sequence
  Description of Artificial Sequence: Synthetic oligonucleotide
ggcgcaccgcgtggcgtggaactgaccggctgacac

SEQ ID NO: 412 - DNA, 36 bp, Artificial Sequence
  Description of Artificial Sequence: Synthetic oligonucleotide
cctgtatccgcgcgcgcgtttgcggctgatgaacac

SEQ ID NO: 413 - DNA, 37 bp, Artificial Sequence
  Description of Artificial Sequence: Synthetic oligonucleotide
gtattcatccccttcagaaaaggaactctctggacac

SEQ ID NO: 414 - DNA, 36 bp, Artificial Sequence
  Description of Artificial Sequence: Synthetic oligonucleotide
ggcgcacccgctggcgcggaacagaccgactgacac

SEQ ID NO: 415 - DNA, 36 bp, Artificial Sequence
  Description of Artificial Sequence: Synthetic oligonucleotide
ctctcaaccgcttgggcagaaccgaccgactgacac

SEQ ID NO: 416 - DNA, 37 bp, Artificial Sequence
  Description of Artificial Sequence: Synthetic oligonucleotide
ctgtcccccccggacctgaccaataagggattgacac

SEQ ID NO: 417 - DNA, 32 bp, Artificial Sequence
  Description of Artificial Sequence: Synthetic oligonucleotide
gtgacatcttatgcgtgtgtacaggtggacac

SEQ ID NO: 418 - DNA, 37 bp, Artificial Sequence
  Description of Artificial Sequence: Synthetic oligonucleotide
gaagaaaagacctctcaaaaaaaattctcctggacac

SEQ ID NO: 419 - DNA, 36 bp, Artificial Sequence
  Description of Artificial Sequence: Synthetic oligonucleotide
gtcgcggcggccgatgcgatcctgatcgatggacac

SEQ ID NO: 420 - DNA, 37 bp, Artificial Sequence
  Description of Artificial Sequence: Synthetic oligonucleotide
gtgtgtttcctcttagaaaaacaaatgctctggacac

SEQ ID NO: 421 - DNA, 35 bp, Artificial Sequence
  Description of Artificial Sequence: Synthetic oligonucleotide
ggggggcaagctcgcgcgtatgcacggattggcag

SEQ ID NO: 422 - DNA, 38 bp, Artificial Sequence
  Description of Artificial Sequence: Synthetic oligonucleotide
ggtggacgtcccccgcgattcccgggtgtgtaccacga

SEQ ID NO: 423 - DNA, 32 bp, Artificial Sequence
  Description of Artificial Sequence: Synthetic oligonucleotide
gttgcaatctgtgcgtatgtatgggtggacac

SEQ ID NO: 424 - DNA, 36 bp, Artificial Sequence
  Description of Artificial Sequence: Synthetic oligonucleotide
actataggtaccctaaaaattccgggtaactacacc

SEQ ID NO: 425 - DNA, 36 bp, Artificial Sequence
  Description of Artificial Sequence: Synthetic oligonucleotide
gatgtagccgcacgttgattcaccggcgattaccac

SEQ ID NO: 426 - DNA, 36 bp, Artificial Sequence
  Description of Artificial Sequence: Synthetic oligonucleotide
gaagaaaaaacctcttaaaaaaattctcctggacac

SEQ ID NO: 427 - DNA, 32 bp, Artificial Sequence
  Description of Artificial Sequence: Synthetic oligonucleotide
gttgcagttcgcgcgtaggcgtgagcggacac

SEQ ID NO: 428 - DNA, 32 bp, Artificial Sequence
  Description of Artificial Sequence: Synthetic oligonucleotide
gtcgcgatccgcacacccgagcgagtcgacag

SEQ ID NO: 429 - DNA, 39 bp, Artificial Sequence
  Description of Artificial Sequence: Synthetic oligonucleotide
gccgccgcagcggccgacgcggccctgatcgatggacac

SEQ ID NO: 430 - DNA, 25 bp, Artificial Sequence
  Description of Artificial Sequence: Synthetic oligonucleotide
gccgcagcggccgacgcggccctga

SEQ ID NO: 431 - DNA, 36 bp, Artificial Sequence
  Description of Artificial Sequence: Synthetic oligonucleotide
gccgcggaggccgacgcggccctgatggatggacac

SEQ ID NO: 432 - DNA, 36 bp, Artificial Sequence
  Description of Artificial Sequence: Synthetic oligonucleotide
atagcgccccccgacgcaaatctgattaatggacac

SEQ ID NO: 433 - DNA, 36 bp, Artificial Sequence
  Description of Artificial Sequence: Synthetic oligonucleotide
gtcgcaatgagataaaacatagatatgtgttgcaac

SEQ ID NO: 434 - DNA, 36 bp, Artificial Sequence
  Description of Artificial Sequence: Synthetic oligonucleotide
gtgcatcggccgacgaagagcgaaggtcagtgacag

SEQ ID NO: 435 - DNA, 37 bp, Artificial Sequence
  Description of Artificial Sequence: Synthetic oligonucleotide
ggcgtcgcgatccgcacacccgagcgagtcgacagca

SEQ ID NO: 436 - DNA, 36 bp, Artificial Sequence
  Description of Artificial Sequence: Synthetic oligonucleotide
gccgcgtcccccgacgcgaccctgatcgatggacac

SEQ ID NO: 437 - DNA, 36 bp, Artificial Sequence
  Description of Artificial Sequence: Synthetic oligonucleotide
ggcgcagcggccatcaggatggtgatcggctgacac

SEQ ID NO: 438 - DNA, 36 bp, Artificial Sequence
  Description of Artificial Sequence: Synthetic oligonucleotide
ggtgaagcggccatcgggatcgtgatcggctgacac

SEQ ID NO: 439 - DNA, 32 bp, Artificial Sequence
  Description of Artificial Sequence: Synthetic oligonucleotide
ggcgcaacccgcacacaaccgcgaatggacac

SEQ ID NO: 440 - DNA, 30 bp, Artificial Sequence
  Description of Artificial Sequence: Synthetic oligonucleotide
gccgcgtcccccgacgcgcccctgatcgat

SEQ ID NO: 441 - DNA, 36 bp, Artificial Sequence
  Description of Artificial Sequence: Synthetic oligonucleotide
attgcaccggccaacgcaaatctgattgatggacac

SEQ ID NO: 442 - DNA, 36 bp, Artificial Sequence
  Description of Artificial Sequence: Synthetic oligonucleotide
ggtggacgtcccccgcgattcccgggtgtgtaccac

SEQ ID NO: 443 - DNA, 34 bp, Artificial Sequence
  Description of Artificial Sequence: Synthetic oligonucleotide
tataggtaccctaaaaattccgggtaactacacc

SEQ ID NO: 444 - DNA, 37 bp, Artificial Sequence
  Description of Artificial Sequence: Synthetic oligonucleotide
gaagaaaaaacctcttaaaaaaattctcctggacact

SEQ ID NO: 445 - DNA, 37 bp, Artificial Sequence
  Description of Artificial Sequence: Synthetic oligonucleotide
ctctcaccccagttcgatcgaggaaggcgactgacac

SEQ ID NO: 446 - DNA, 36 bp, Artificial Sequence
  Description of Artificial Sequence: Synthetic oligonucleotide
ggcgtaccgcctgacgggtttctcatcgatggacac

SEQ ID NO: 447 - DNA, 36 bp, Artificial Sequence
  Description of Artificial Sequence: Synthetic oligonucleotide
ggcgcaccgcctgacgggtttctcatcgatggacac

SEQ ID NO: 448 - DNA, 36 bp, Artificial Sequence
  Description of Artificial Sequence: Synthetic oligonucleotide
accgcggcgataccggctttcccgggtgactgacac

SEQ ID NO: 449 - DNA, 32 bp, Artificial Sequence
  Description of Artificial Sequence: Synthetic oligonucleotide
gtcgcacctcgcgcgtatgcacggattggcag

SEQ ID NO: 450 - DNA, 32 bp, Artificial Sequence
  Description of Artificial Sequence: Synthetic oligonucleotide
gttgcaacctgtgcgtatgtgcggatggacac

SEQ ID NO: 451 - DNA, 26 bp, Artificial Sequence
  Description of Artificial Sequence: Synthetic oligonucleotide
ggagagcgaaaaaaagcgggggagat

SEQ ID NO: 452 - DNA, 39 bp, Artificial Sequence
  Description of Artificial Sequence: Synthetic oligonucleotide
ggtaccgcggcgataccggctttcccgggtgactgacac

SEQ ID NO: 453 - DNA, 33 bp, Artificial Sequence
  Description of Artificial Sequence: Synthetic oligonucleotide
ggcgcaaccccgcacatgcgggcgggatgacag

SEQ ID NO: 454 - DNA, 32 bp, Artificial Sequence
  Description of Artificial Sequence: Synthetic oligonucleotide
gtcgcaccccgcgcgtgcgagcgtgttgacag

SEQ ID NO: 455 - DNA, 37 bp, Artificial Sequence
  Description of Artificial Sequence: Synthetic oligonucleotide
ggagcgcccccccgacgcggccatgatcgactgacgg

SEQ ID NO: 456-499 - skipped (44 entries)

SEQ ID NO: 500 - DNA, 1353 bp, Unknown
  Description of Unknown: aquatic-freshwater-freshwater lake sequence
actttttctaccatgaaaaaaaacccatctgataaaacaataatgaacctagaatttatgtttttttatatagaatggatgaaaagattagaaactagtcctgattataataaaccttttattgaagaactgtttgggattactatttagattatcgttagctaaagacaattgaaaaaatgacttgaagattctgagcaaaagattaggattttaaaaggagaaattccgtgggcacaagagccataaaagcaaagattatttgtgacaaaacaacacttggttatttgtggcgatctcactgtatgtacaatcagaaactctctgagtatatgaaattactttttaaacttcgacgtggtaagattggtaaaaataaagattatgcgaataaaaatgaggaagaaaagcagaaaataattgacaatcttgaagcaatacttagacctcatctgcaaaaaatgcactttaccaccaaaaaagaacgctcacttgacgttccagaacacccacttgacgttcctttttgagcttgttaagatatggtcattgaggagttttggtggagttacgaccatcccacagacatggcaagccatagctgaaagccttgatagccttcgttttgtgtccaaagtctgctgatctgactgctttcgggcatttaggatattacaaaaaaggaaacttttttggcggcgggcaaggcgagggcaattagaagtagatcttttgctgtttgacaaatttagtcaattttcgtcgtattctattgatgcgagtgacgaggtatgatcgtttttgccgtagctgctcgcgagctaggtgtagtaacgacttaagcacagctaagcattgtaaaaatttgaatttaaacccttatttttcaaggtgctcgtcaagtgtgttctaagttgttgtagagacttcgttaaggactagggccccgttggaaaaagaaagagttagatcatctaatccataagcattggaatatttccaaagatcaaagataggaatccaagtgggaaaaaagaaagtagggggaaaaggaaaaataaaacaaaaataattttcaaaagagatgttctggattcagaaaaaaaccagaagaatttaaaattgtgaagggtaaaatctgtttggggaggagggtatttctccaccgaactactcaagattctctaaaattaggaaaagtttatgaagacatctaaggcagaatttaaaattattaaattaacatttgctgataaaaaatggggactagtattgatttttgttggtatttgtttgggtcctgtgattgtaggtattccattaattatacttggtgtggggatgttatgcata

SEQ ID NO: 501 - DNA, 1671 bp, Unknown
  Description of Unknown: freshwater sediment metagenome sequence
ctgcaatcggacctcgaagctgaaatgaacctcaaagacgaccagacaatgattatcgatatgggtccgaacgaaaaagaggccagagacgcagccgctgtaatcggccagtccctgccgaaattcgaaaccagaatgatcgtcgtataaaattgacatcccggttatgttttatatgattaggcataatagaggattacgaaaggagctaatatgtcggtgaggtcttttcaagcaaaagtggaatgcgacaaacaaataatggaacatctttggcggacgcacacggttttcaatgaacggcttccggtaattatcaaaattttgttccagatgaaacggggcgaatgcggccaaaatgattcggtcaatttgcacaggcgatttctgatagatgatgcgttaaagaattattatggattcaaaaagctgcctgagaaaaagcaaaaagaggcaatagcagctattgagaactcgctgaaagaaaaattatctacaattcacaaaatataaaatattttccttgtgtcttaacatagttgaacatttttacttgtctttgccgatattctgaaaaagggacaaattgttgtcccataaaggataacgttcgggaggcaagacaatgcaagctctttcaaaattctgttgtcaaaataaaagatgcacggattacggaaaacgtggtgcaaataatttatcggtgtgcggcagattcggcaaaaatgaccatatccggctgctatactgccgaacatgcaagaagcgattttcctataatttttgctggccggtacggacacttcgtttacaaggccaagatgagcggtggcacgcaaggacacctgcgatggccgcggatttgacagatcatgtctggtctttgcatgaatggttgagttatccggcttttcaattaacataagacacaaggaatatttttcttgcagcataaatatgcaaaaagtacaataatctcgtggagtaaggtaggagtgacgcccgcccgtttagcgtgctataggccgctgaatgccacgtagcgatatgttttgagtgtcaagagctgctgacccaaaggccaaaagctgagtagggcttgatagtcgtggttattaccatgcaatgcggcagcgacacatatcgcgttaatcaaatttgcgttgtcgtcaagatggattcaggccattgcgcaagtgtcctctttgacaagttcagacgcgagtgcgacggtggtgaaggggggcactgggaatgctcgcagcgggaatttgtgcaactgcttccaggatttgaggaactattgacaatatggtttggcgcgaatttttacagtttttttaccttgctcgtaaaccaaacgctaaccgcagatgcaaaaagaacttgcagaagaagccatcaagccacagagaacagaggaattttcataattacgccactgcatataaatccttatgtgccaaatactgatgaataaaaaatatcataactttcaaatccatccaagggcgaacccttttcagccgcctaacatgataaggcagcatactaacacgactacgacctttgaacaagctataccaacgctccaccacactacgtctttccagcagccgttgtccctcaacactctgcaacatacaatacgaagcattacgaccgggttgt

SEQ ID NO: 502 - DNA, 1056 bp, Unknown
  Description of Unknown: bioreactor metagenome sequence
ctggagaatgcattgcgggatgtggttaacctcaagcaggatcaggtgctaattgtcgatttggggtcgaatgaggaggcggcgcgcgagtcggcgacgacgctcgggccggcgttgccttcccaagacgaggggatcgtggtaatctaatctgagcggttcagcaccggtcccgcacccgcggcgatagctattcttggaggtgtagacgtgggagtccgggcacttcgagcgcgaatcgagtgcgatcgagaaacgcttatgcacctttggcgcacgcactgcgtcttcaatcaacgcctacccgcgctgctgaaacgcttgttcgcaatgcggcgaggggaagtgggggggaacgaggcgcagcggcaggtttaccaacgtgttgcgcagtttgttcttgcgcgcgacggcgatcaagccgtcgccgccttccgtgctctcccaccgcgggattcccccgccaggaccttagccgttaaaagggtcgaagatacccttcgcccacagttgatgcgcgtgcacaaacttgcggatgcaggggttgacagccccttctgaggctctgatatactgggtttgtggggcgagccttcgggcggtatatccgagccgaagtccacgtagtcgtcgcccctgtgtgtcaacacgtgctgactccaaggcgaacagccgaaggaggccccgcaagggtgacatcgtggcgggctcgcacgccccggcggcacggacagcgacggcattgatcaggtccgcgtcggcgcgggcggcgcttcgcggcggtgttctttgaaaagtcggtcgtcgcggccttggccgaggataaagtcggtgcgacgcagccaactgcgaccaacgccgtgggcgcgtcagggcgcccgcgagtgcgacggtggtgaagggggggcctgggcacgctcgcgagggcgtaagtctttgagaattgaggacttgcagcttgctggttttcggatgcgaccgaacagttgccgtacgtgcgggtcacgctcgcaaacgcacgcgcaagttcggtatttacagcaacttgcgagtgcg

SEQ ID NO: 503 - DNA, 1396 bp, Unknown
  Description of Unknown: bioreactor-switchgrass degrading sequence
caagccggcgacgtcgagcgcacctatgccgacctgacgcggtcgaaggcagaactcggctacgacccgcaggtggagattacggaaggcctgcggcggttcgtggcgtggtatcgggagaatcgggagaggtatcggctggaggtgtgagggggattcgggagcgacgaagcgacggagcgacgaaggggaaggcgtatgatgcataggggcaggcaactagcccgccctactgcctgatcttctcgaccggccacataatagtgggcgcatctccacgggcacaacagtgagcgagtcaggtcggcatgacttccacagatctgattgtctgttcttgcatgggaaattgcacagtcaactgaatccacgttatccttgatcttgctgccaaaggaggaccaggtggggatcaaatcttggcgcgttaaattatgggtggaatcgcctgagatacgcgcgactctggaatattgtctcagcctgtggaacacttcggctgctttactttgtcggcatatactagcgatgcgtcgtggcgactttggcccggaagggcaagcgatctgggagcacctaaagaaaaccccacataattttcatgtcctttatcctatctccaatggcagcggcatagaaaagactaccggatattaccccgatgcacgagcattcgttgtcttccttggaacatttcccactgtgcagaccatccagcgccaaccgcggatctacgagatcaatggccagcgcgttgctctggatgagatacagcagcgcgctgttgaaatccttgccagtcgccgcgcaggtgatacacccttttaagatttgtttgcggtatcagacaggaatagttaacatttgcggtggatcaggtccgaaagggccggcccgaggttcggctataggcccaacctcgcaccagcgggcgctgtctagccgaaattggcgagcgaggctcttctcagggcccgctcgaaacctgtggctacgattacgtggctgcgtgggcttttcggcaccccgttggacacgcttcggtatgcggaacgcgaaccaccagcgcgcaccagttgcatagcggattcgcgtttagcgcaagttctttctcaagcgaactgtgcaaacagtgggtcagcaaatcgcttctgttgcatttgcctggacgagacgattcgcgaaagtggactgtagctcttggtcctgcctttaactagagcaaggccgccgataccactggcgacggcttgcacgccgacagggtcgcgatcggtaacgtcctgaattgtgcgcacatttgaaaaggcagctcgtccgctggaaggtgttggtgtgtagacaacccttaccagacaggagagctgcatggacagcgtaacagaagcggcgcagg

SEQ ID NO: 504 - DNA, 1003 bp, Unknown
  Description of Unknown: bioreactor metagenome sequence
caacacggcctgggctacgccccgttccccgcctccgtgatttcccccaggaactggaccgaccactgccacctgaaccccaacggcgagcgcgaaaaagccacgcacatcgccgaccatgtccgccccttcatccgcgctccgcgataagcattttcggacggaatatgtctcatcggatgcacttgacggtggctgcgccgccgagcggagtgcccgtgcttgcccatccatcgacccgttggcatcctgtgaacaggaaccaggcacatgtccacacgcgctattcaggccagagttgtcgccgacaaggcactgctgcaaaagctctggctgacccacagggcgttcaacgaacatttgccccatttttcgcaaaccctgttccgcatgatgcggggcgagttgggcgactccgatcgcttcgcccttggtgaaaccgccatcgctgccgccatggacttgtggcatcgccccaagcccgaaaaagaggctatgcgaaaatcaatcgaagcccaactccgatcaaaactggaaatcgaacacaagctcgccgaaccgctgccctaaggctcttcaaggagcttgcgctgggcacccaggttttcatacgttgatcgcgtggagcaagggaccgggtcgcgtcggtttccaccatttggctataggccaggcggttgccacatggcgccatgtttttgagtgtcaagatgtgctggtcctaaggcgacacgccgaagggactttaccctccgggcaactggaaggggcggcacagacccatggcgcgttcactcctacgatctttgaagcgcgagctgcgacgttcgcgaacctatagcggacaaccatctacagagaggtccgcgggcggcgcaaccaccgcccccacgaggacttgtcacgctcgttctccgctcgcctcttgcgggatcgggaatcgcgtttcgcttcgcgaactggcgatgtgcgcacttgtgcttcaatcctttgcactgcaagg

SEQ ID NO: 505 - DNA, 1116 bp, Unknown
  Description of Unknown: aquatic-freshwater-freshwater lake sequence
gccggctggacctccgagttccccggccagccgccccccacccgcatcgccctggccgggccggacgccctcctgttcttctacctcacgctcctccaggacatcaacaccaagaccctcctcccgcccgacctcgaattttactggtagccgggctagatagtctctcttgcggaaagtgcgatcacaggcgggacgcctgtgccaccgctgagacaaggggcttggtggcacaggcctctggcctgtgattggggcaccgagggcgtggatacgatggacatggtggaccccgaggcccgcgccgccctctggcgcacccatggggtctacaacgagtgcctccggttcgccctgcgccacatgcacaagatgaagcgcggggaggccgacccgcgctacgcggagatattcggcgcgatccgcgtggagaggcccaacaaggacaagcgggtcttccgcctgactcccaggggccagccaaccgtggaagtggacatggccgacgtggagaagcgcatcctcgcgcggggaagggccgaagacctctgccgcggcaagcccacgccattttgagcttgactttcccggccaaactgtcatgaatggtgttggccctgcgtggaatagcgcgggccgccggcggggctgctataggccgcgtcggactacgtcgggcatccagttgttacggccgcgtgggcctacgggtttcggcccaaagggcacaagaccggatgggtcactggacctgtcagggcggcggccaggcccggcgacacgaccgagaatgttggggaaaaaggaggcccggaccgccaaagaatggcccggatggggcgcttttttcagccgaaatgcgggctaactccttgcgccctctcgacttcggcggtatctggtgtaggcgcgggtagacttttcggacgatgtcagggcaagggcgaaggggtcagacctcaattctctactttcctgccccgggtggtgtgccgacagcggcgtcgagccgccgcagtccgacgggctgacgcacgctcgggtgcccgtgacggtgcgagaggcatggggtacggcgggtggctgggaaaggacaacagggaccacagggacaac

SEQ ID NO: 506 - DNA, 1059 bp, Unknown
  Description of Unknown: bioreactor metagenome or bioreactor-anaerobic-anaerobic biogas reactor sequence
ctggagaatgcattgcgggatgtggttaacctcaagcaggatcaggtgctaattgtcgatttggggtcgaatgaggaggcggcgcgcgagtcggcgacgacgctcgggccggcgttgccttcccaagacgaggggatcgtggtaatctaatctgagcggttcagcaccggtcccgcacccgcggcgatagctattcttggaggtgtagacgtgggagtccgggcacttcgagcgcgaatcgagtgcgatcgagaaacgcttatgcacctttggcgcacgcactgcgtcttcaatcaacgcctacccgcgctgctgaaacgcttgttcgcaatgcggcgaggggaagtgggggggaacgaggcgcagcggcaggtttaccaacgtgttgcgcagtttgttcttgcgcgcgacggcgatcaagccgtcgccgccttccgtgctctcgcaccgcgggattcgcccgccaggaccttagccgttaaaagggtcgaagatacccttcgcccacagttgatgcgcgtgcacaaacttgcggatgcaggggttgacagccccttctgaggctctgatatactgggtttgtggggcgagccttcgggcggtatatccgagccgaagtccacgtagtcgtcgcccctgtgtgtcaacacgtgctgactccaaggcgaacagccgaaggaggccccgcaagggtgacatcgtggcgggctcgcacgccccggcggcacggacagcgacggcattgatcaggtccgcgtcggcgcgggcggcgcttcgcggcggtgttctttgaaaagtcggtcgtcgcggccttggccgaggataaagtcggtgcgacgcagccaactgcgaccaacgccgtgggcgcgtcagggcgcccgcgagtgcgacggtggtgaagggggggcctgggcacgctcgcgagggcgtaagtctttgggaattgcggacttacagcttgctggttttgggatgcgaccgaacagttgccgtacgtgcgggtcacgctcgcaaacgcacgcgcaagttcggtatttacagcaacttgcgagtgcggca

SEQ ID NO: 507 - DNA, 1702 bp, Unknown
  Description of Unknown: lab enrichment-defined media-ionic liquid and high solid enriched sequence
gcgtctacggcaatgccagcaaggtccccttcagcgaagaagaccccgtcgatcagcccatcagcccctacgcagccaccaaacgcgccggggagctgatctgccatacgttctggcatctgtacaaaatgccgatcttctgcctgcggtttttcaccgtctacggcccccgccagcggccggacctggccattcacaagttcacgcggctgatcgacgccggcaagccgatccccgtcttcggcgacggcagcatgtcgcgcgattacacgtatgtgtcggacacggtggctgggatcatgagcgccctggaccgatgcgaccgctaccgcatctacaacctcggcggctcgaatccggtgacgctcacgcagttgatccaggagatcgggaccgccctcggcaagcaggccatcatcgaccgcaaacccacccaagccggcgacgtcgagcgcacctatgccgacctgacgcggtcgaaggcagaactcggctacgacccgcaggtggagattacggaaggcctgcggcggttcgtggcgtggtatcgggagaatcgggagaggtatcggctggaggtgtgagggggattcgggagcgacgaagcgacggagcgacgaaggggaaggcgtatgatgcataggggcaggcaactagcccgccctactgcctgatcttctcgaccggccacataatagtgggcgcatctccacgggcacaacagtgagcgagtcaggtcggcatgacttccacagatctgattgtctgttcttgcatgggaaattgcacagtcaactgaatccacgttatccttgatcttgctgccaaaggaggaccaggtggggatcaaatcttggcgcgttaaattatgggtggaatcgcctgagatacgcgcgactctggaatattgtctcagcctgtggaacacttcggctgctttactttgtcgacatgtactggcgatgcgtcgtggcgactttggcccggaagggcaagcgatctgggagcacctaaagaaaaccccacataattttcatgtcctttatcctatctccaatggcagcggcattgaaaagactacccggtattatcccgatgcacgagcattcgttgtcttccttggaacatttcccactgtgcagaccatccagcgccaaccgcggatctacgagatcaatggccagcgcgttgctctggatgagatacagcagcgcgctgttgaaatccttgccagtcgccgcgcaggtgatacacccttttaagatttgtttgcggtatcagacaggaatagttaacatttgtggtggatcaggtccgaaagggccggcccgaggttcggctataggcccaacctcgcaccagcgggcgctgtctagccgaaattggcgagcgaggctcttctcagggcccgctcgaaacctgtggctacgattacgtggctgcgtgggcttttcggcaccccgttggacacgcttcggtatgcggaacgcgaaccaccagcgcgcaccagttgcatagcggattcgcgtttagcgcaagttctttctcaagcgaactgtgcaaacagtgggtcagcaaatcgcttctgttgcatttgcctggacgagacgattcgcgaaagtggactgtagctcttggtcctgcctttaactagagcaaatgtctcggctggcgatatcgtcgtcgtcggcgtcgcgatccg

SEQ ID NO: 508 - DNA, 1090 bp, Unknown
  Description of Unknown: bioreactor metagenome sequence
gaggatggaccagacggcgccgccgcgctccttgagcatcgcggcaagaacgtgcaggccggtgacctccgggttctgacgcgccgcggcgtcggactgggcgtcggcaagggtctgctgggcgagcgtggtgaagcggtcggtgcgcatgggtcgtgctcccgagggagtctggctgactcggtctgccggattgttgggcaaaacgggggccagtcgtgagaggctttggaggggggttttacggagcgcggactgccggaatggcagggggacgccggccgtcggccaaccgccccccgggcgcctcccggcaagtttcgttaggatggtcgccgtggaggccgcctcagatgggtgttaaagcctggaaggcgaagatcatcgtggccgacccggacctggcggccgctctggaccacaccgtccggcaatggaacctctgggcggaacaggcctgcatcgccatcatgcgcctgcgccgcggcgactacggggacgaggtcctgatcgggacgttcccgcaggtccggcgcatctcgcgcgacccgccggtgctgtcgatcgccgatgtccgggtggaccagcgggaggcggatcgcctggccgcggcgtggctgagcgaactgtcggtcggcccgacgcccttctgaggtggcgtcggatgggggcttccggtatactgccgtcgctaccgcctgcacagggcggcgcggcggaccggctataggcccgtccgtcgtacgtcgggaactgtcgagccgggagtgacgtggcggggcctcggccctgttcaagaccttcacccctctcgtgggggtggtgggcttcccggcaacccggcggctgatccatcacgcggccgccgcgaatatcgagcgcccacgccgacgccgggaggttcgcggaagtcgcaacgctctttgacagcccaagttgcgctcaggaggcccgatgaccggcttggctctccgttcaaaaacagccgattcgcggaggaacgctccgaagtgccgaccggtcaacctcttacgggcgggagctactacgaggcgatgcggatcggcgggaacgcccgctgcatcggccg

SEQ ID NO: 509 - DNA, 598 bp, Unknown
  Description of Unknown: aquatic-non marine saline and alkaline-hypersaline lake sediment sequence
ttcgagatcgacaccgaatcacgcatagggtgtcaggagatagtaccctaaaaattctgagtaatctacacctgtcgcgttctccttgttgaccatgattttattagagattggtaaaaatattagattgaagatcgaatatattagatattagagaaaagttattggagatagataatgtcagtgaaaacaattcaagcaaaattagaatgtgacagagagactttagagactctatggagaactcatacggtttttaatgaaggtcttttacctattttagctttattttttaagatgaagcgtagagaaacaggatcaacagaattacacagaaagttctatgattggtcagtagtagacaagtactttactttgcttagaagtgataattataaggaacagaaaaaagtgattgaagaagaacttcgagagtttttgaggaaagagcattttcctcaaatggctctgaattaaaaagtggagaatttatccaatgcctatagggaaattggataaccacacaggccttggttttgatggtgaatatctgttgattatttggtctgagggccttaaataaattacatggatagta

SEQ ID NO: 510 - DNA, 1394 bp, Unknown
  Description of Unknown: lab enrichment-defined media-ionic liquid and high solid enriched sequence
gaggatggaccagacggcgccgccgcgctccttgagcatcgcggcaagaacgtgcaggccggtgacctccgggttctgacgcgccgcggcgtcggactgggcgtcggcaagggtctgctgggcgagcgtggtgaagcggtcggtgcgcatgggtcgtgctcccgagggagtctggctgactcggtctgccggattgttgggcaaaacgggggccagtcgtgagaggctttggaggggggttttacggagcgcggactgccggaatggcagggggacgccggccgtcggccaaccgccccccgggcgcctcccggcaagtttcgttaggatggtcgccgtggaggccgcctcagatgggtgttaaagcctggaaggcgaagatcatcgtggccgacccggacctggcggccgctctggaccacaccgtccggcaatggaacctctgggcggaacaggcctgcatcgccatcatgcgcctgcgccgcggcgactacggggacgaggtcctgatcgggacgttcccgcaggtccggcgcatctcgcgcgacccgccggtgctgtcgatcgccgatgtccgggtggaccagcgggaggcggatcgcctggccgcggcgtggctgagcgaactgtcggtcggcccgacgcccttctgaggtggcgtcggatgggggcttccggtatactgccgtcgctaccgcctgcacagggcggcgcggcggaccggctataggcccgtccgtcgtacgtcgggaactgtcgagccgggagtgacgtggcggggcctcggccctgttcgaaaccttcacccctctcgtgggggtggtgggcttcccggcaacccggcggctgatccatcacgcggccgccgcgaatatcgagcgcccacgccgacgccgggaggttcgcggaagtcgcaacgctctttgacagcccaagttgcgctcaggaggcccgatgaccggcttggctctccgttcaaaaacagccgattcgcggaggaacgctccgaagtgccgaccggtcaacctcttacgggcgggagcagatgcagccaaggggcggactcgaaccgcccctcgcacgtatccgccggaaaagggcgaatgccagtgaccgaagaacgggtccggccgttccgcaacactcaatcgccgccgcggcaatcaggcagagcccgcctcagcaacatcatcccccgcgccccctgctccgcccttctgagatcgcgcaggccctcaacccgtctacgccaccacgtccagccgctcccccactcccggcgggctcgcgccctgggcgaccttcgccgcggcctggatcatctgcaccgcggcctggccctgctgctcggcgtggtcgaggaccttccgggcgacgcggatgctcgcggcgga

SEQ ID NO: 511 - DNA, 748 bp, Unknown
  Description of Unknown: aquatic-freshwater-freshwater microbial mat sequence
gaattgaatgcaaccgcgaagaattacaacatctttggcggactcactgcgccttcaacgaaaggttgccatcaatcctttcggtcctgttcaaaatgcgtcgtggagaatggggtgacaccgaacagataaagaaaaaaatgcaggctttcttctttctcgatgggcaggccgtccaggcattctacgattggaagggcaagccggagccggaaagaaaaacgtttttcgcggcaatggacggcaagctgcagccagcgctgagagtggaacataaattggatggtccgacaccgttttaaaattcgaagacttgcggcaggatgcaatcaggttacgtttacgtttgtgggttgtacccgctcggcgtgctataggcaggccgggaccacaaaagcactgcgtttgagtgtcaagacctgctgaccgaacggccaaaagcctagtagggccagactgaggaggggcaacccaccaagggcggcaggaacacgcagtgagttgttcagcttgcgttgtgaggactgttggtgggtctttgacaactcattttgcgcggctttttgccgcgagcgcggaggtggtggtgcgggtgcgtcgttgcgctcgcacctacttaacctcttacggtgcaagggcctcgtcaacggaaatggtgagtcgcatgtgtctcgatcagttgattccacgcaggtgctcgttatgggactgccaagtcccggtcaaatcatggtgtgcgagcgcgaca

SEQ ID NO: 512 - DNA, 832 bp, Unknown
  Description of Unknown: aquatic-non marine saline and alkaline-hypersaline lake sediment sequence
ttctacagcaagacttagccgaaatgcccccaagatgttgcggtgtcagcaaagcaggcaatacaatatccggcaccaaatcgcccgaagtcttgctgtagagaaaatgtacgcctgaccccgttgtccccccttgcccgccccaagcgatgacggcaagcggagtacgtcttctactgaatcgaaaggacccgaaatgtcacaaagggcccttgccgtacgacttctggttgactctgaagacgatcgcgcggcgctgtggcgaacgcaccgcatattcaatgagcgcctcggatgggtgctgcgtcagatgcatcggatgaaacggggcgaaccggacgcgcgcgaactcccgaaggtcaagaagctgcgcgagggcgtgtatgagctagcgaagcctgatcacgcgcccaaagaagtgaagcctgccgagcttaggagtgcggttagcgtcgcggcggccgcgatgtgccgcgggcaggcgagccccttctaggcattgacttcccttctgtacctgatacgatatggatcagagttgcgagattaccgtaacctgaccggcagggctataggccgtgtcggtgagcgccgggaaccagtggttatggccgcatgggcctacgggttaccccaatgggcacgaaaccgacccggtcggcttcgccgatccagcgagggcggcggcctttgcccggcgacacaatcgggaatttcggggaaaactgccgcttcgcaccccgggaaaggggctggaaagagtgttttttcgaggcgttttcgttctaagtccttttgcagcgaggagttcggtccggaacttattgtccaa

SEQ ID NO: 513-600 - skipped (88 entries)

SEQ ID NO: 601 - protein, 481 aa, Unknown
  Description of Unknown: wastewater-anaerobic digestor-anaerobic digestor sludge sequence
MKATTITKSLRFWIDEPPERCRLLYGVSDELTDAYNAILEYWETDVRKVAVEATEAAIEAYHVWKDAPKETRGDKPKWWSADTATRAAFLRVGVAATSTIRTRLVDNMVQGEWLRDVKTYMSRRFKDHIAAGIRHRAKGVVISLDQSTMKPDVQLGDDGRWTIRCALWAQGTEESARNNDRWLLSPYDRKRQTWTIANLLEADQHGEVRGVKLVPPKPGAPAGKRRWSAMITVTLPVESSVLDEERPNVAGVDMGLTHFAVYSCPARNTFEFVSSRELQAAMEKARRRRRGVPRKRSTALGQKLGRRQDALCRLTARRLIDCCRRDRVGTLRVEDLTGIRDQGSDDADRNFALGARFPYYKLQTYLEQAAASAGVRLEKVQPAGTSQTCSRCAVRDPESRDGKRFVCRHCGYKGDADLNAANNIASGRFRRSIRPSTQPAGRIPSAAPDCTGEAVKASDVDAELQPARTPAACGGDPYAGE

SEQ ID NO: 602 - protein, 512 aa, Unknown
  Description of Unknown: aquatic-thermal springs-hot spring sequence
MEKVILTITSGVEFLQPQDEQLVIKAAKWYTEARKALLYNALQKGEEGVKQAASTLSTLNFPPAPHSRLPDLLTRDVGGTLQALKERREGYAQDFSRWWEEICRVANEKGSQAVSVLKPHVNKLSSLIHQLSWNSPEWDEEAQEVFKELKQIWAVVRQKDHERLKIKWRAEVPPVPRPPRTPKFQRLVFNADGRVSGGSRSNALQIEEREDGDLYLRLQLRDPERVAKKGSYQDVWLRLVIEDEERKQMLKNFAPKYLQLRQDGKRWIAHIVIERENEFEVPQYVYGVDIGARKYLLAAVAIPLNPALPKPPNIAVPSSKFWQIVERVEAEWRKWQQLRTGKRDKEGRVVLKKRKMAWRVLKRKRRMRREVTKSMIAEAVNTFIKSLERPCAIVIEQIKNLHLSPTLQDRKSRWRQRRWAYRFLLEMLRYKAEWEGIRVIEVNPAYTSQTCPRCGKRDRNARQGNLFQCTKCRFQHNADFVAAYNITVRGLMKLRTRGKVDWKVLTGKPRVL

SEQ ID NO: 603 - protein, 481 aa, Unknown
  Description of Unknown: activated sludge metagenome sequence
MKATTITKSLRFWIDEPPERCRLLYGVSDELTDAYNAILEYWETDVRKVAVEATEAAIEAYHVWKDAPKETRGDKPKWWSADTATRAAFLRVGVAATSTIRTRLVDNMVQGEWLRDVKTYMSRRFKDHIAAGIRHRAKGVVISLDQSTMKPDVQLGDDGRWTIRCALWAQGTEESARNNDRWLLSPYDRKRQTWTIANLLEADQHGEVRGVKLVPPKPGAPAGKRRWSAMITVTLPVESSVLDEERPNVAGVDMGLTHFAVYSCPARNTFEFVSSRELQAAMEKARRRRRGVPRKRSTALGQKLGRRQDALCRLTARRIIDCCRRDRVGTLRVEDLTGIRDQGSDDADRNFALGARFPYYKLQTYLEQAAASAGVRLEKVQPAGTSQTCSRCAVRDPESRDGKRFECRHCGYKGDADLNAANNIASGRFRRSIRPSTQPAGRIPSAAPDCTGEAVKASDVDAELQPARTPAACGGDPYAGE

SEQ ID NO: 604 - protein, 481 aa, Unknown
  Description of Unknown: activated sludge metagenome sequence
MKATTTTKSLRFWIDEPPERCRLLYGVSDELTAAYNAILEYWETDVRSVAVEVTEAAQAAYHVWKDAPKETRGDKPKWWSADTATRAAFLRVGVAATSTIRTRLVDNMVQGEWLRDVKTYMSRRFKDHIAAGIRHRAKGVVISLDQSTMKPDVQLGDDGRWTIRCALWAQGTEESARNNDRWRLSPYDRRRQTWTIANLLEADQHGEVRGVKLVPPKPGAPAGKRRWSAMITVTLPVESSVLDEERPNVAGVDMGLTHFAVYSCPARNTFEFVSSRELQAAMEKARRRRRGVPRKRSTALGQKLGRRQDALCRLTARRLIDCCLRDRVGTLRVEDLTGIRDQGSDDPDRNFALGARFPYYKLQTYLEQAAASAGVRLEKVQPAGTSQTCSRCAVRDPESRDGKRFVCRHCGYKGDADLNAANNIASGRFRRSIRPSTQPAGRIPSAAPDCTGEAVEASNVGAELQPAREPVAGGGDPYAGE

SEQ ID NO: 605 - protein, 481 aa, Unknown
  Description of Unknown: activated sludge metagenome sequence
MKATTITKSLRFWIDEPPERCRLLYGVSDELTDAYNAILEYWETDVRKVAVEATEAAIEAYHVWKDAPKETRGDKPKWWSADTATRAAFLRVGVAATSTIRTRLVDNMVQGEWLRDVKTYMSRRFKDHIAAGIRHRAKGVVISLDQSTMKPDVQLGDDGRWTIRCALWAQGTEESARNNDRWLLSPYDRKRQTWTIANLLEADQHGEVRGVKLVPPKPGAPAGKRRWSAMITVTLPVESSVLDEERPNVAGVDMGITHFAVYSCPARNTFEFVSSRELQAAMEKARRRRRGVPRKRSTALGQKLGRRQDALCRLTARRIIDCCRRDRVGTLRVEDLTGIRDQGSDDADRNFALGARFPYYKLQTYLEQAAASAGVRLEKVQPAGTSQTCSRCAVRDPESRDGKRFECRHCGYKGDADLNAANNIASGRFRRSIRPSTQPAGRIPSAAPDCTGEAVKASDVDAELQPARTPAACGGDPYAGE

SEQ ID NO: 606 - protein, 419 aa, Unknown
  Description of Unknown: activated sludge metagenome or wastewater-anaerobic digestor-anaerobic digestor sludge sequence
MIKTVTFYIAEMPREDKRLCDRLCIDLGAAGARMVREWFRACDETPPGAAIDWPEVQRRGVAVGKAMVEAAGYRTELGNDLARAEFFARFKMEFKKVLKGERASLPFPGRAPFIFLRMDPGHETAIIEQRDDAWYMRNPRFYPGGDSNEANRREWRLKPVDRKGWAENILEAAEKFACVRIMPDRKKPGSWVVKITVHLPDALERKLVEEHECWAGIDLGINCPAVLSIPDRDKGGFVRFFGMDKYTALWAKLNRYEERKRALNRVGQQHAARDLRAKITGLRQYINEQISREIIDLCLRMHVTGIRMEDLKGLRTEGTGKLKYWPRFHLTTRIEQKAREVGLAFEQIRAAGTSQTCSVCGHRHRDNRHGSDFLCLRCGFARHADVNAANNIARGMQDFDLPAGSAAPGRALRLELSAQ

SEQ ID NO: 607 - protein, 341 aa, Unknown
  Description of Unknown: aquatic-freshwater-freshwater lake sediment or freshwater metagenome sequence
MTATKQQILQTEYDNLQHFLQTGEDLGVYSANKQQAKRYYKTIKPEHQYPLSIRNDLIQVQHKPNSIAEYWLKIPVKGRRGGLWVAIRPHQQIPDNAEFLESKIRRKRKGWFANIVIQKQIEPIRTKNILAVDLGEHVIATVCGSFDNQRPRFYGRDVRGIRRHYAWLRKRLGEKKLLGVIRRIKDTEKRKVNDTLHKISRSIVDLAQEHNATIVLGELQGIRNHAKGRRMNRIVSNMPYLKLSQMIEYKAEWLGIPVIKMQEHDTSKTCSRCNEYGKRPTQGQFRCDTCHRTSFNADYNGALNILKRATSYMDIAGAVSEPARDWGNDDQTSEATQLFEW

SEQ ID NO: 608 - protein, 353 aa, Unknown
  Description of Unknown: aquatic-freshwater-freshwater lake sediment or freshwater metagenome sequence
MAQKTITAKIVAMTATKQQILQTEYDNLQHFLQTGEDLGVYSANKQQAKRYYKTIKPEHQYPLSIRNDLIQVQHKPNSIAEYWLKIPVKGRRGGLWVAIRPHQQIPDNAEFLESKIRRKRKGWFANIVIQKQIEPIRTKNILAVDLGEHVIATVCGSFDNQRPRFYGRDVRGIRRHYAWLRKRLGEKKLLGVIRRIKDTEKRKVNDTLHKISRSIVDLAQEHNATIVLGELQGIRNHAKGRRMNRIVSNMPYLKLSQMIEYKAEWLGIPVIKMQEHDTSKTCSRCNEYGKRPTQGQFRCDTCHRTSFNADYNGALNILKRATSYMDIAGAVSEPARDWGNDDQTSEATQLFEW

SEQ ID NO: 609 - protein, 373 aa, Unknown
  Description of Unknown: aquatic-freshwater-sediment or freshwater sediment metagenome sequence
MANRELVVVMQVQKVVKGKVVGLTHAKRQILDHEYEGLQRFLQGDSNVELYSANKQQAKRFYKTVKPEREYPLSIRKDLIRVERRDTKIARYWARIPAKLRRGGVWVAVKPHCEITDDLEICESKLLRRNGEYFLHLAVKREVELNTSYSSVLAIDLGIRHVACSVDTRSGETHFHGRELRRVRGHYFHLRRRLGEKKLLKVIKRIGARESRITNDQLHKIAKAIVDEAERLNALIAIGNPKGIRRNGKGRRFNRKLNSWPFWKLRQYIEYKANWRGIAVVEVNEAYTSQRCWRCGTIGTRSGTHHGLFECPRCGLRENADRNGAFNIGRRALGQVSKVGAVVSQPVTGAVPFSELGSVVQCPTPEATLFKGW

SEQ ID NO: 610 - protein, 373 aa, Unknown
  Description of Unknown: aquatic-freshwater-sediment sequence
MANRELVVVMQVQKVVKAKVVGLTHAKRQILDHEYEGLQRFLQGDSNVELYSANKQQAKRFYKTVKPEREYPLSIRKDLIRVERRDTKIARYWARIPAKLRRGGVWVAVKPHCEITDDLEICESKLLRRNGEYFLHLAVKREVELNTSYSSVLAIDLGIRHVACSVDTRSGETHFHGRELRRVRGHYFHLRRRLGEKKLLKVIKRIGARESRITNDQLHKIAKAIVDEAERLNALIAIGNPKGIRRNGKGRRFNRKLNSWPFWKLRQYIEYKANWRGIAVVEVNEAYTSQRCWRCGTIGTRSGTHHGLFECPRCGLRENADRNGAFNIGRRALGQVSKVGAVVSQPVTGAVPFSELGSVVQCPTPEATLFKGW

SEQ ID NO: 611 - protein, 342 aa, Unknown
  Description of Unknown: aquatic-freshwater-sediment sequence
MILQKTVNAKLFALTRTKEQKISREYWNFQKALHGEDAPLYSATKQQAKRKNAWNGDCEYPLVLRRDCFGVKELGLKFARWWAKIPVFGGSIWCPVQLPYVQEPLLKGNIRETKLVRRKKGWFLRITVQQEIELDVPCASVVGVDFGERHIATSVEWQGRFQNPIFYGAEVRGIRRHYAWLRKRLGNKKALRTIKKVGGKENRKVNAVLHNISRAIVDRAKELSAVILLGAPNGGSMRRKALSKGKRFTRIVYSMPYYRLRQFIEYKAVQEGILVVNANEEWTSKTCSFCGEISDRPRQDLIVCPHGHRLNADINACRNLIKRFIDHWLIDGAILASPKLPH

SEQ ID NO: 612 - protein, 368 aa, Unknown
  Description of Unknown: aquatic-freshwater-sediment sequence
MKSQKIIKCKITYLTNIKAQQLETEHHNLQNLLQLEREGLDFLPIYQNIPLHSANKQQALRFYKRISTDKIYAISIRNDIIKVELKPNNKISKYWCKIPVKQRYGGIWVAIKPHKKDIDFSQYKLGESKLFKKKNEWWIYITIIREVQIKDSYSNILGIDLGSKVIATVCGSFYNQRPTFYGREVRGIRRHYQYIRTELGKKKLLKKIKQLSDKEHRIVNDLLHKISKQIVEKAEQTDSYIVLGDLKGIRNSTKNKGRNFRRIVSNMPYLKLTQFIEYKAKEKGIKIIRISEKGTSKICSKCGYEDKGNRKSQGLFKCKQCGFELNADANGARNILKFSDGYTLPERAMSELALNSNQLEKPTCFSGG

SEQ ID NO: 613 - protein, 343 aa, Unknown
  Description of Unknown: aquatic-marine-deep subsurface sequence
MLVEKTVKAKVIAPTNRKQELLDREYQSFQYTLYGGEANLYSATKQQAERFLRKIKTPKHRHYPLILRRDVIRLERQETKVAPYWFKFPVFGVRGGIWLGLKPHCDIPVDCSLREAKLIRRKNAWFIHLTIQKEVPESIIDEHHILAVDLGERYLATVCGNNGTNPQFLGKEVRGIRRHYAWIRKRLGERKLLNTTRKVGHTEQKKVNDICHQISRRIVNEARETDSVIILGDLKGIRKNAKGKRMNRIVSNMPYYKLTQFIKYKAAWDGVPVLVIPEAYTSKGCHRCGSLGSRPYRGLFLCHSCKLHYNADLNGARNILKRALDYMSSAGAALAQPVTQSLN

SEQ ID NO: 614 - protein, 365 aa, Unknown
  Description of Unknown: aquatic-marine-marine sediment sequence
MKVKKTIKAKILELRKGKEELLKREYENWQRYLRGDKTVPLYSATKQQADRLLKRLKGRLKPNKEYPMILRRDVYRANTKLTPYWLKISIYGVRGGINVPIKTHEPITEDMVCREAKIIRKGDEWFVYITVEKEVEERNPKSILAIDLGIRWMATTVNSNNPKPNFYGKELRKVKGHYFYLRRSLTLKKAYKTIKKIGLKERRVVNDILHKISRAIVNEALENDSMIVLGNLKGIRRNGKGRRFNRKLNNGFPYYRLSQFIEYKAKWLGIKVIKISEKNTSKLCHKCGEEGVRVGSSFKCPNCGYSCHADYNGAMNILKRAMGLVSVAGAGLTQPRTRYDEARRPKNRESPHLSGKSVKSYSFKF

SEQ ID NO: 615 - protein, 382 aa, Unknown
  Description of Unknown: aquatic-non marine saline and alkaline-hypersaline or Halohasta litchfieldiae tADL sequence
MKQTAEKTVVAKIFTNDLTQSKLDAINHEYEAFQRYIRGDEEADLYSATKQCADAYVDTDNLRDDHDYPWFIRNDVFDVGVDVEQHDTDLTDWWLKLPVSQVWGGVNVPIQPHDEIPDEADVKDSKIVRVNGDYYAHLTVQQEVEVSEEYGGVIGVDFGVRWVATSVALPSRNTEFYGREIRRIRRHHHDLRTRLQEKGAYGTLQSVKVKEYRQVNDRLHKISRAIVEEAKECDALIVVGDLEGIQNQDLGAEMNRRLHSMPHHTLKTYIEYKAMFAGIAVKSVNEYMTSQTCWRCGEQEATTRKGQGQHLCHECGLDDNADKNGATNIAKKGLGKDIACPLSSLGAVCEPVLGPSGADQASATVCLRADLEAPASTKRTVR

SEQ ID NO: 616 - protein, 432 aa, Unknown
  Description of Unknown: aquatic-non marine saline and alkaline-saline lake or salt lake metagenome sequence
MSLKTLTFWPIGMSAKYRRIFDNIRKQLGAAQREMVKAWLRLALAEDAYGIDPGKRAGREVFGDNEYSNDLLNNLAYADAHENFKQQWKRVRSGNATSVSFSDAAANVLFLMPPSGGHHATVEHIDGNWWITRLKVFGGCTKADRERNDQFRWQLKGVSRFGGKYEKDLMDGAQRICQVRVTPSRKDPSKYVVQVTVEVPDLQTVGARTPVCAGIDLGINCPVVLSIPDKGFVQFMGRERDEYPRLWEKLREYEDRKRRLNRAGKRRAARDLRPRITNVRKYINEAISKDVADTCRALGVTHLRMEDLKGLSRHKSMTGKLRYWPRYHLQERIERKCCEVGIEVERIKPAGTSQTCSVCGHREKANRNGAQFVCIECGYQQHADLNAANNIARGMQTFGPCAKSSASDDAIGLRFDSEGQESALGQAKRLFA

SEQ ID NO: 617 - protein, 521 aa, Unknown
  Description of Unknown: aquatic-thermal springs sequence
MKKVVITVTTGVEFLQPQDEQIVRKAAEWYTKAREALFAHALQQGKVKEAASTLRTLNFPMAPHSRLPDLLTRDVGGILKALKEKREGYLGEFKRWWEEDCRVANEKGSQAVADLKTHVGKLLNLVHQLPWNSPVWDGEAQEAFKNLKEAWAVVRQKDHEQLKIRWRAEVSPLRRPPRTPKFQRLVFNADGRVSGGSKSEALQIEEREDGDLYLRLQLRDPEGVVGGGAYQEVWLRLVVEDEERKQMLRDFAPKYLQLRQDGKRWIAHIVIEREIKFGLKGIMWTAGDYLYGVDIGARKYLLAAVAVPLKPGLPKLPNIAIPSGKFWQAVERVEAEWRKWQRLRTGKKDKEGKVVLKKRTAWRVLKRKRRMRREVAKNMIAEAVNTFINFIKGDNVDIRLWLAIEQIKNLNLSPAFQDRKSRWRQRRWAYRLLLEMLRYKAEWEGIRVIEVNPAHTSQICPRCGKKDGKARQGNRFCCTKCKFQHNADFVAAYNIAVRALKKLGMREEIGWKVLTGKPRVL

SEQ ID NO: 618 - protein, 546 aa, Unknown
  Description of Unknown: aquatic-thermal springs-hot spring sequence
MKHLVSNAQVNEKNEARLTLKCGLEFENAEGEELVKRAAEWYCKARIFLLSYALKNNKTRVQKIASLLKSEGFPSPPHPRLIDLLQRTITPAIKNMRRLRRRYPKTLRAWFDRVKKFAEEKGSDAAERLQPYVEDLLQLVKNLPINSPAWDTDAQEKWKELKKLWGKVRESDWKKGIVWKFQIPNPKKPPSTPAFRCADSSNIFVTADYRMSGKNARNSYDMKTDSEENLWVLVRLDDVDGDVKVRKDVWIKLCVDKSRYDLLRIGKITEIKILRNRDGRWEGRIVVKMNAGYNSPQVVVGVDVGASEHLIAAVGIPLDGSNNNFLLSVPASYFWKRVEQAERLWRRWQRLYTGRTSEKKKAPILPRRRKAYQILKRNRNWRREVTKHCIFHAVKKFVQLLPPNSVVVVENLKDIPPNVWKEDKDKRFRRWVYAFLLFTLKYKCQQRKIAVIAVSPHNTSQTCPRCGVVDPKSRGLWKDGELISRKHFCCTQCKFTHNADFVAAHNIAVLGAKALGITLPESWRALRGEVQYVIPYQNMPKVRKSW

SEQ ID NO: 619 - protein, 543 aa, Unknown
  Description of Unknown: aquatic-thermal springs-hot spring sequence
MNNKQVTFGGLFLMALQKKRVRRTIVAGVEIESAEEENLVTEAAKWYLQAKQKLLQYAIEKRKERITAPARILKDELKLPEPPHSRLPDELAQVINGVLKALKKRRTEYLRRFQDWWNKVVEVGNQHGLESYRAMKPKVEALISSVPNNPFDPTWDSDIQKRFAEVKEIWSKIRLKDSNERNFRWRYHVPPLVKPPKTPEFKLLGFDAGARVSGGGKAKTLTIKSQDGEIFLRLLLRQPGVSNHGRGSYREIWLHIILEDESRKALLLSDKVQAKFIRLRRRTDKWEAHITVEKEVSFEKPRVIYGIDIGMKDALLFCVPIFIDSQETTETASEGKKLIVVEAGQFWHRLEVEDAQWRKWQFRRSGKVKEGIKGKRMVWRILKRRRRRRREVTKHLIHQIVNALISQLQRPCAVAIERLKGLRNKPHLTDKRSQWKFHRWAYRFLLETLRYKLEWEGIMIIEVPPYGTSQTCPRCSHRDKRSRDGRRFRCTKCKFQHNADAAGAFNIAMRAVEQLQSSRDLQEVSIAESAWKILTGKPMVLKY

SEQ ID NO: 620 - protein, 530 aa, Unknown
  Description of Unknown: aquatic-thermal springs-hot spring sequence
MALQKKRVRRTIVAGVEIESAEEENLVTEAAKWYLQAKQKLLQYAIEKRKERITAPARILKDELKLPEPPHSRLPDELAQVINGVLKALKKRRTEYLRRFQDWWNKVVEVGNQHGLESYRAMKPKVEALISSVPNNPFDPTWDSDIQKRFAEVKEIWSKIRLKDSNERNFRWRYHVPPLVKPPKTPEFKLLGFDAGARVSGGGKAKTLTIKSQDGEIFLRLLLRQPGVSNHGRGSYREIWLHIILEDESRKALLLSDKVQAKFIRLRRRTDKWEAHITVEKEVSFEKPRVIYGIDIGMKDALLFCVPIFIDSQETTETASEGKKLIVVEAGQFWHRLEVEDAQWRKWQFRRSGKVKEGIKGKRMVWRILKRRRRRRREVTKHLIHQIVNALISQLQRPCAVAIERLKGLRNKPHLTDKRSQWKFHRWAYRFLLETLRYKLEWEGIMIIEVPPYGTSQTCPRCSHRDKRSRDGRRFRCTKCKFQHNADAAGAFNIAMRAVEQLQSSRDLQEVSIAESAWKILTGKPMVLKY

SEQ ID NO: 621 - protein, 512 aa, Unknown
  Description of Unknown: aquatic-thermal springs-hot spring sequence
MEKVILTITSGVEFLQPQDEQLVIKAAKWYTEARKALLYNALQKGEEGVKQAASTLSTLNFPPAPHSRLPDLLTRDVGGTLQALKERREGYAQDFSRWWEEICRVANEKGSQAVSVLKPHVNKLSSLIHQLSWNSPEWDEEAQEVFKELKQIWAVVRQKDHERLKIKWRAEVPPVPRPPRTPKFQRLVFNADGRVSGGSRSNALQIEEREDGDLYLRLQLRDPERVAKKGSYQDVWLRLVIEDEERKQMLKNFAPKYLQLRQDGKRWIAHIVIERENEFEVPQYVYGVDIGARKYLLAAVAIPLNPALPKPPNIAVPSSKFWQIVERVEAEWRKWQQLRTGKRDKEGRVVLKKRKMAWRVLKRKRRMRREVTKSMIAEAVNTFIKSLERPCAIVIEQIKNLHLSPTLQDRKSRWRQRRWAYRFLLEMLRYKAEWEGMRVIEVNPAYTSQTCPRCGERDRNARQGNLFRCTKCRFQHNADFVAAYNITVRGLMKLRTRGRIDWKILTGKPRVL

SEQ ID NO: 622 - protein, 490 aa, Unknown
  Description of Unknown: aquatic-thermal springs-hot spring sequence
MLQYAIEKRKERITAPARILKDELKLPEPPHSRLPDELAQVINGVLKALKKRRTEYLRRFQDWWNKVVEVGNQHGLESYRAMKPKVEALISSVPNNPFDPTWDSDIQKRFAEVKEIWSKIRLKDSNERNFRWRYHVPPLVKPPKTPEFKLLGFDAGARVSRGGKAKTLTIKSQDGEIFLRLLLRQPGVSNHGRGSYREIWLHIILEDESRKALLLSDKVQAKFIRLRRRTDKWEAHITVEKEVSFEKPRVIYGIDIGMKDALLFCVPIFIDSQETTETASEGKKLIVVEAGQFWHRLEVEDAQWRKWQFRRSGKVKEGIKGKRMVWRILKRRRRRRREVTKHLIHQIVNALISQLQRPCAVAIERLKGLRNKPHLTDKRSQWKFHRWAYRFLLETLRYKLEWEGIMIIEVPPYGTSQTCPRCSHRDKRSRDGRRFRCTKCKFQHNADAAGAFNIAMRAVEQLQSSRDLQEVSIAESAWKILTGKPMVLKY

SEQ ID NO: 623 - protein, 521 aa, Unknown
  Description of Unknown: aquatic-thermal springs-hot spring and microbial mat streamer sequence
MEKVVITITTGVEFLQPQDEQIVRKAAEWYTKAREALFDHALQQGKVKKAASTLRTLNLPMAPHSRLPDLLTRDVGGILKALKEKRKGYLREFKRWWKEVCKVANEKGSQAVAVLKPHVDKLLNLVRQLPWNSPVWDGEAQEAFKNLKEAWAVVRQKDHEQLKIKWRAEVSPLRRPPRTPKFQRLVFNADGRVSGGSKSEALQIEEREDGDLYLRLQLRDPEGVVGGGAYQEVWLRLVVEDEERKQMLRDFAPKYLQLRQDGKRWIAHIVIEREIKFGLKGIMWTAGDYLYGVDIGARKYLLAAVAVPLKPGLPKLPNIAIPSGKFWQAVERVEAEWRKWQRLRTGKKDKEGKVVLKKRTAWRVLKRKRHMRREVAKNMIAEAVNTFINFIKGDNVDIRLWLAIEQIKNLNLSPAFQDRKSRWRQRRWAYRLLLEMLRYKAEWEGIRVIEVNPAHTSQICPRCGKKDGKARQGNRFCCTECKFQHNADFVAAYNIAVRALKKLGMREEIGWKVLTGKPRVL

SEQ ID NO: 624 - protein, 516 aa, Unknown
  Description of Unknown: aquatic-thermal springs-sediment sequence
MKKVVITITTGVEFLQPQDEQIVRKAAEWYTKAREALFAHALQQQQGKVEKAASTLRTLNFPMAPHSRLPDLLTRDVGGILKALKEKREGYLGEFKRWWEEVCRVANEKGSQAVAALKTHVDKLLNLVHQLPWNSPVWDGEAQEAFKNLKEAWAVVRQKDHEQLKIKWRAEVSPLRRPPRTPKFQRLVFNADGRVSGGSKSEALQIEEREDGDLYLRLQLRDPEGVVGGGAYQEVWLRLVVEDEERKQMLRDFAPKYLQLRQDGKRWIAHIVIEREIKFGKPDYLYGVDIGARKYLLAAVAVPLKPDLPKLPNIAIPSGKFWQAVERVEAEWRKWQRLRTGKKDKEGRVVLKKRTAWRVLKRKRRMRREVAKNMIAEAVNTFINFIKGDNVDIRLWLAIEQIKNLNLSPAFQDRKSRWRQRRWAYRLLLEMLRYKAEWEGIRVIEVNPAHTSQICPRCGKKDGKARQGNRFCCTKCKFQHNADFVAAYNIAVRALKKLGMREEIGWKVLTGKPKVL

SEQ ID NO: 625 - protein, 516 aa, Unknown
  Description of Unknown: aquatic-thermal springs-sediment or sediment metagenome sequence
MKKVVITITTGVEFLQPQDEQIVRKAAEWYTKAREALFAHALQQQQGKVEKAASTLRTLNFPMAPHSRLPDLLTRDVGGILKALKEKREGYLGEFKRWWEEVCRVANEKGSQAVAALKTHVDKLLNLVHQLPWNSPVWDGEAQEAFKNLKEAWAVVRQKDHEQLKIRWRAEVSPLRRPPRTPKFQRLVFNADGRVSGGSKSEALQIEEKEDGDLYLRLQLRDPEGIVGGGAYQEVWLRLVVEDEERKQMLRDFAPKYLQLRQDGERWIAHIVIEREIKFGKPDYLYGVDIGARKYLLAAVAVPLKPDLPKLPNIAIPSGKFWQAVERVEAEWRKWQRLRTGKKDKEGRVVLKKRTAWRVLKRKRRMRREVAKNMIAEAVNTFINFIKGDNVDIRLWLAIEQIKNLNLSPAFQDRKSRWRQRRWAYRLLLEMLRYKAEWEGIRVIEVNPAHTSQICPRCGKKDGKARQGNRFCCTKCKFQHNADFVAAYNIAVRALKKLGMREEIGWKVLTGKPKVL

SEQ ID NO: 626 - protein, 417 aa, Unknown
  Description of Unknown: fermentation metagenome sequence
MIKTATFYLADMPQEDKRLCQLLCDELGAAGSAMVREWYRACDEVDGERINWGDVQARGVQVGKQAFADRGYRGELVNDLQRAEFFARFKTEFKKIAAGERASLPFPGSAPFIFLRMDPGHEVASVVNEGGTWYLCNPHFYPGGSRSEDNRREWRLKDVGRNGWGYAILAEAEKFACIRIMPDRKKRGSWVVKITVHLPDAIARREVEKQEVWAGIDLGLNCPAVLSIPDHPDGGFVRFLGNDQYPRLWKRLDDYEERKRVLNRAGKREAARDLRAKITGVRQHINELISREIVDLCLAMRVTGLRMEDLKGLGVEGSGRLKFWPRFHLVTRIEQKCGEVGLTFEKIKPAGTSQTCSSCGHRDKDNRNGPDFVCLRCGFARHADVNAANNIARGMDDFDLPTGASAPTKARRLEIAS

SEQ ID NO: 627 - protein, 512 aa, Unknown
  Description of Unknown: Fervidibacteria bacterium JGI MDM2 sequence
MEKVILTITSGVEFLQPQDEQLVIKAAKWYTEARKALLYNALQKGEEGVKQAASTLSTLNFPPAPHSRLPDLLTRDVGGTLQALKERREGYAQDFSRWWEEICRVANEKGSQAVSVLKPHVNKLSSLIHQLSWNSPEWDEEAQEVFKELKQIWGVVKQKDHERLKIKWCAEVPPVPRPPRTPKFQRLVFNADGRVSGGSRSNALQIEEREDGDLYLRLQLRDPERVAKKGSYQDVWLRLVIEDEERKQMLKNFAPKYLQLRQDGKRWIAHIVIERENEFEVPQYVYGVDIGARKYLLAAVAIPLNPALPKPPNIAVPSSKFWQIVERVEAEWRKWQQLRTGKRDKEGRVVLKKRKMAWRVLKRKRRMRREVTKSMIAEAVNTFIKSLERPCAIVIEQIKNLHLSPTLQDRKSRWRQRRWAYRFLLEMLRYKAEWEGMRVIEVNPAYTSQTCPRCGERDRNARQGNLFRCTKCRFQHNADFVAAYNITVRGLMKLRTRGRIDWKILTGKPRVL

SEQ ID NO: 628 - protein, 514 aa, Unknown
  Description of Unknown: freshwater metagenome sequence
MEKVVITITTGVEFLQPQDEQIVRKAAEWYTKAREALFAHALQQGKVKKAASTLRTLNLPMAPHSRLPDLLTRDVGGILKALKEKREGYLREFKRWWEEVCRVANEKGSQAVAALKTHVDKLLNLVHQIPWNSPVWDGEAQEAFKNLKEAWAVVRQKDHEQLKIKWRAEVSPLRRPPRKPKFQRLVFNADGRVSGGSRAEALQIEEREEGDLYLRLRLRDPEGVVGGGAYQEVWLRLVIEDEGRKQMLRDFAPKYLQLRQDGKRWIAHIVIEREIKFGEPDYLYGVDIGARKYLLAAVAVPLKPDLPKLPNIAIPSGEFWQAVERVEAEWRKWQRLRTGKKDKEGRVVLKKKRMAWRVLKRKRRMRREVAKNMIAEAVNTFINFIKRGNVNSGLAIEQIKNLNLSPTLQDRKSRWRQRRWAYRLLLEMLRYKAEWEGIRVIEVNPTHTSQICPRCRKKDGKARQGNRFCCTKCHFQHNADFVAAYNIAMRGLRKLGMRGEIGWKVLTGKPRVLQ

SEQ ID NO: 629 - protein, 454 aa, Unknown
  Description of Unknown: freshwater metagenome sequence
MAPHSRLPDLLTRDVGGILKALKEKREGYLREFKRWWEEVCRVANEKGSQAVAALKTHVDKLLNLVHQIPWNSPVWDGEAQEAFKNLKEAWAVVRQKDHEQLKIKWRAEVSPLRRPPRKPKFQRLVFNADGRVSGGSRAEALQIEEREEGDLYLRLRLRDPEGVVGGGAYQEVWLRLVIEDEGRKQMLRDFAPKYLQLRQDGKRWIAHIVIEREIKFGEPDYLYGVDIGARKYLLAAVAVPLKPDLPKLPNIAIPSGEFWQAVERVEAEWRKWQRLRTGKKDKEGRVVLKKKRMAWRVLKRKRRMRREVAKNMIAEAVNTFINFIKRGNVNSGLAIEQIKNLNLSPTLQDRKSRWRQRRWAYRLLLEMLRYKAEWEGIRVIEVNPTHTSQICPRCRKKDGKARQGNRFCCTKCHFQHNADFVAAYNIAMRGLRKLGMRGEIGWKVLTGKPRVLQ

SEQ ID NO: 630 - protein, 332 aa, Unknown
  Description of Unknown: fungi-mycelium-attine ant fungus gardens sequence
MKITVKAKVTDDSKNKLGKIESEFQNYQVYLQSGCTTRVNLYSATKQQAQRALKKIKQPNPKKQYPVILRRDLVDIQQDIKFEGVYWIKIPVYPNSINIRIKTSCKYDLTQHSIRESKILKIQNVWYIFITIEKQDERIIRADNVLAVDLGCKNIAVTVNTINTKPNFYGAAIRGIRGFYFNLRRKLGEKKASDKIKLLKNIEFLQVNHELHKISKAIVEEAKRTNAVIVLGKLKGIRKNIKGSRRIRRLINNFPYYRLVQYIKYKAAWHSIKTLEISEADTSNTCFNCRTKDKKARKTQGLFQCGNCSIKTNADYNGAMNILQRGVGYFQL

SEQ ID NO: 631 - protein, 384 aa, Unknown
  Description of Unknown: Haloarcula quadrata sequence
MKRNVSTTVRAKLHSLTNRKTDLLAREYEAFQTEVHGGDADLYSATDQQASKVQRQKYPNPGTEQPVVLRNDVFDVAYDEDTVLSSWWVKVPVYDPEKGQGNSIWCPAHVPHKDEQLVREGNLRDSELVRSDGDWYVHLVVKRSVTVQDEYDDVLAIDMGARWVATCAFLSDRKTTFYGEEVRRIREHYKQLRKSIGKAKPRQGQQVVERIGDAEARKVDDRLHKIARSIVEDAEERNAVIVVGDLGGIRKDNDKGRYVNDKTHKMPFARLLNYIEYKAHGAGIDVQLVEEYDTSKTCNRCACEGVRTTQGRFECPECGLDDNADKNGALNIGKRALGKFLKPLSEAGAVLAQSETQVIVQRDDEPANLSVSVDSTPSGGTPRL

SEQ ID NO: 632 - protein, 384 aa, Unknown
  Description of Unknown: Halorubrum sp. Atlit-26R sequence
MQRNVSTTVRVKLHSLTNRKADLLAREYEAFQTAVHGGDADLYSATDQQASKVQRQKDPNPDTEQPVVLRNDVFDVAYDEDTVLSSWWIKVPVYDPEQGRGNSIWCPAHVPYKDEQLVREGDVRDSELVRRDGNWYVHLVVRRSVTVQDEYDDVLAIDMGARWVATCAFLSDRKTAFYGEEVRRIREHYKQLRKSIGKAKPRQGQQVVKRIGDAEARKVDERLHKIARQIVEDAEERNAVIVVGDLGGIRKDNDKGRYVNDKTHKMPFARLLNYIEYKAHDAGIDVQLTNEYDTSQTCNRCACKGVRETQGRFECPECGLDDNADKNGALNIGKRALGKFSKPLSEAGAVLAQPETQVIVPRDDEPANLSVSVGSTPSGGTPRL

SEQ ID NO: 633 - protein, 384 aa, Unknown
  Description of Unknown: Halorubrum tebenquichense DSM 14210 sequence
MQRNVSTTVRVKLHSLTNRKSDMLAREYEAFQREVHGGDADLYSATKQQASKVQQQKDPNPDTEQPVVLRNDVLDIAHDKDTVLSSWWMKVPVYDPERGQGNSIWCPAHVPHKDETLVQEGDIRDSELVRRDGDWYVHLVVKRSVTIPDEYDDVLAIDMGARWVATCAFLSDRDTTFYGEEVRRLREHYKQLRKSIGKAKPRQGQQVVERIGDAEARKVDDRLHKIARHIVEDAEERNTVIVVGDLGGICRDNDKGRYINDKIHKMPFARLLNYIEYKAHGAGIDVVLVEEYDTSKTCNRCACEGVRETQGRFECPECGLDDNADKNGALNIGKRASGKFSKPLSEAGAVLAQPKTQVIVERDEEPANLSISVGSTPSGGTPRL

SEQ ID NO: 634 - protein, 535 aa, Unknown
  Description of Unknown: hot springs metagenome sequence
MRRRKPQQEGKEVQRTIICGVKFVAHEDEQLITESAKWYLEAKQKLLRYALQQEKVSISNPATVLKGLSVPAPPHSRLPDELSQAVSGILKALKKRRSEYLEKFQNWWQEVVRVSNKHGLQSFIPLKPKVEAFLNALANVKSWADPAWDGELQRRFEELKDMWAVVRQRDSNERRFRWRLHVPPLPKPPKTPELRLLGFDAGVRVSGGSRAQTLQIEQRNNDLFLRLLLARPGEKSKAGQYREVWLQLVLEDDLRKNWLLSPDIEAKFVRLRQIEDGKWQAHITVRKKVAKSEDFNIVYGIDIGLKRALLYCVPVATANAKPENWKELRLNKFIVPAGEFWHRVIVEDERYRKWQRRFKGKKTEGIKGKRMAWRILKRLRKRRRKVTELLIHRVVNSLLENLMKASETAGFAIAIERLKDLRNKPHLTSGKAQWKFHRWAYRFLLNTLRYKAEWEGVTVIEVNPAGTSQTCPRCGYKSRESRHDRLFRCRRCKFQHNADAVAAFNIAKRVIEMKNGQVNQDAWKVLTGEWNVLKY

SEQ ID NO: 635 - protein, 537 aa, Unknown
  Description of Unknown: hot springs metagenome sequence
MQVRRRKPQQEGKEVQRTIICGVKFVAHEDEQLITESAKWYLEAKQKLLRYALQQEKVSISNPATVLKGLSVPAPPHSRLPDELSQAVSGILKALKKRRSEYLEKFQNWWQEVVRVSNKHGLQSFIPLKPKVEAFLNALANVKSWADPAWDGELQRRFEELKDMWAVVRQRDSNERRFRWRLHVPPLPKPPKTPELRLLGFDAGVRVSGGSRAQTLQIEQRNNDLFLRLLLARPGEKSKAGQYREVWLQLVLEDDLRKNWLLSPDIEAKFVRLRQIEDGKWQAHITVRKKVAKSEDFNIVYGIDIGLKRALLYCVPVATANAKPENWKELRLNKFIVPAGEFWHRVIVEDERYRKWQRRFKGKKTEGIKGKRMAWRILKRLRKRRRKVTELLIHRVVNSLLENLMKASETAGFAIAIERLKDLRNKPHLTSGKAQWKFHRWAYRFLLNTLRYKAEWEGVTVIEVNPAGTSQTCPRCGYKSRESRHDRLFRCRRCKFQHNADAVAAFNIAKRVIEMKNGQVNQDAWKVLTGEWNVLKY

SEQ ID NO: 636 - protein, 546 aa, Unknown
  Description of Unknown: hot springs metagenome sequence
MKHLVSNAQVNEKNEARLTLKCGLEFENAEGEELVKRAAEWYCKARIFLLSYALKNNKTRVQKIASLLKSEGFPSPPHPRLIDLLQRTITPAIKNMRRLRRRYPKTLRAWFDRVKKFAEEKGSDAAERLQPYVEDLLQLVKNLPINSPAWDTDAQEKWKELKKLWGKVRESDWKKGIVWKFQIPNPKKPPSTPAFRCADSSNIFVTADYRMSGKNARNSYDMKTDSEENLWVLVRLDDVDGDVKVRKDVWIKLCVDKSRYDLLRIGKITEIKILRNRDGRWEGRIVVKMNAGYNSPQVVVGVDVGASEHLIAAVGIPLDGSNNNFLLSVPASYFWKRVEQAERLWRRWQRLYTGRTSEKKKAPILPRRRKAYQILKRNRNWRREVTKHCIFHAVKKFVQLLPPNSVVVVENLKDIPPNVWKEDKDKRFRRWVYAFLLFTLKYKCQQRKIAVIAVSPHNTSQTCPRCGVVDPKSRGLWKDGELISRKHFCCTQCEFTHNADFVAAHNIAVLGAKALGITLPESWRALRGEVQYVIPYQNMPKVRKSW

SEQ ID NO: 637 - protein, 512 aa, Unknown
  Description of Unknown: hot springs metagenome sequence
MEKVILTITSGVEFLQPQDEQLVIKAAKWYTEARKALLYNALHKGEEGVKQAASTLSTLNFPPAPHSRLPDLLTRDVGGTLQALKERREGYAQDFSRWWEEICRVANEKGSQAVSVLKPHVNKLSSLIHQLSWNSPEWDEEAQEVFKELKQIWAVVRQKDHERLKIKWRAEVPPVPRPPRTPKFQRLVFNADGRVSGGSRSNALQIEEREDGDLYLRLQLRDPERVAKKGSYQDVWLRLVIEDEERKQMLKNFAPKYLQLRQDGKRWIAHIVIERENEFEVPQYVYGVDIGARKYLLAAVAIPLNPALPKPPNIAVPSSKFWQIVERVEAEWRKWQQLRTGKRDKEGRVVLKKRKMAWRVLKRKRRMRREVTKSMIAEAVNTFIKSLERPCAIVIEQIKNLHLSPTLQDRKSRWRQRRWAYRFLLEMLRYKAEWEGIRVIEVNPAYTSQTCPRCGKRDRNARQGNLFQCTKCRFQHNADFVAAYNITVRGLMKLRTRGRIDWKILTGKPRVL

SEQ ID NO: 638 - protein, 532 aa, Unknown
  Description of Unknown: hot springs metagenome sequence
MEKVVITITTGVEFLQPQDEQIVRKAAEWYTKAREALFDHALQQGKVKKAASTLRTLNLPMAPHSRLPDLLTRDVGGILKALKEKRKGYLREFKRWWKEVCKVANEKGSQAVAVLKPHVDKLLNLVRQLPWNSPVWDGEAQEAFKNLKEAWAVVRQKDHEQLKIKWRAEVSPLRRPPRTPKFQRLVFNADGRVSGGSKSEALQIEEREDGDLYLRLQLRDPEGVVGGGAYQEVWLRLVVEDEERKQMLRDFAPKYLQLRQDGKRWIAHIVIEREIKFGLKGIMWTAGDYLYGVDIGARKYLLAAVAVPLKPGLPKLLESQGDNVGIRHIAIPSGKFWQAVERVEAEWRKWQRLRTGKKDKEGRVVLKKKRMAWRVLKRKRRMRREVAKNMLAKAVNTFILDFIKRNNVDIWLAIEQIKNLNLSPTLQDRKSRWRQRRWAYRLLLEMLRYKAEWEGIRVIEVNPAHTSQICPRCGKKDGKARQGNRFCCTKCHFQHNADFVAADNIAMRGLRKVGMRGEIGWKVLTGKPRVLQ

SEQ ID NO: 639 - protein, 384 aa, Unknown
  Description of Unknown: lab enrichment-defined media-aerobic enrichment media sequence
MQQTVSTTVRVKLPSLTNRKADLLAREYEAFQTEVHGGDADLYSATKQQASKVRRQKDPNPDTEQPVVLRNDVFDVSYDEDTVLSSWWVKVPVYDPERGRGNSIWCPAHVPHKDEQLVQEGDVRDSELVRRDGDWYIHLVVKRSVTVQDEYDDVLAIDMGARWVATCAFLSDHKTTFYGEEVRRIREHYKQLRKSIGKAKPRQGQQVVERIGDAEARKVDDRLHKIARQIVGDAEERNAVIVVGDLGGIRKDNDKGRYVNDKTHKMPFARLLNYIEYKAHDAGIDLQLVDEYDTSQTCNRCACEGVRATQGRFECPGCGLDDNADKNGALNIGKRALGKFSRPLSEAGAVLAQSETQVIVHRDEEPANLSVSVDSTPSGGTPRL

SEQ ID NO: 640 - protein, 376 aa, Unknown
  Description of Unknown: lab enrichment-defined media-aerobic enrichment media sequence
MRVKLPSLTNRKADLLAREYEAFQTEVHGGDADLYSATKQQASKVRRQKDPNPDTEQPVVLRNDVFDVSYDEDTVLSSWWVKVPVYDPERGRGNSIWCPAHVPHKDEQLVQEGDVRDSELVRRDGDWYIHLVVKRSVTVQDEYDDVLAIDMGARWVATCAFLSDHKTTFYGEEVRRIREHYKQLRKSIGKAKPRQGQQVVERIGDAEARKVDDRLHKIARQIVGDAEERNAVIVVGDLGGIRKDNDKGRYVNDKTHKMPFARLLNYIEYKAHDAGIDLQLVDEYDTSQTCNRCACEGVRATQGRFECPGCGLDDNADKNGALNIGKRALGKFSRPLSEAGAVLAQSETQVIVHRDEEPANLSVSVDSTPSGGTPRL

SEQ ID NO: 641 - protein, 429 aa, Unknown
  Description of Unknown: landfill metagenome or solid waste-landfill-landfill leachate sequence
MALKTLTFWPLEIPPEHKRIFDDIRKQLGNAQREMVKAWLKLALAAEPYGITPGEQAGRVLFGETDYSNGLLKSLAYTDAHDSFKEQWKGVLKGDATSVSFPDEASGVVLLVGSGQATVEKIDGEWWVTRLLVFGGRTAEDRSRNDQFRWQLKGVSRFGGHYEKSVMDRAERICQVRVLPARKDRGKYVVQVTVEVPDEQIERTAIPVCAGIDLGINCPVVLSIPDKGFVRFMGRERDEYPRLWEKLREYEDRKRTLNRAGKRRAARDLRPRLTNIRKYINEAISKDVADTCRAMRVTTLRMENLKGLSFHKSGTGKLRHWPRYHLQERIEQKCGEVGIEVERIKPAGTSQTCSMCGHRDKGNRNGSDFICLACGYRQHADLNAANNIARGMQEFGPCVQSSASDNTIELRFDGAGQEPALGRAMRLFA

SEQ ID NO: 642 - protein, 468 aa, Unknown
  Description of Unknown: landfill metagenome or solid waste-landfill-landfill leachate sequence
MDTAANETTPKALCFWLGALSDAEFKLLHELSRQLARCHATFVQAALEYQFAADRGSAPEVIAQTGPNKGKPSSDPRETYAKRAFQAEFAKAPFMRKFGDTYCRQVSGKDFKRQWGLIRTGQKSSVSFGPGSHANIDILTGRQAAIEHDADGWWLCGLGITLEDRKERPGRRWALIPQTNGGAAVKAKQAARMLRQLEEAVRTPQVRLVWRDGKRGGSKGWEAQVVCHMPVKVAKPAEPVVCGIDVGMRCLLVASIPERRKARFIGGNTFGKLWHEIERHGKRRSVLNKAHKRHAAAAKSDKVSRIRRHACELASRQLIDWCVYHHVSTIRMEDLSGIRDRCSEDGATEQQRTWNKRLAHWPWYTLQQRIEQKAAAVNIAVEKINPHLTSQTCSACGHVDKGNREGAQFRCLSCGFECHADLNAANNIAGRDPATDFDTPDRAAVRSDGPKSRPQAGRASRLVAASTP

SEQ ID NO: 643 - protein, 440 aa, Unknown
  Description of Unknown: landfill metagenome sequence
MLGQVKTVKFHITGVTRDQGEALTGSLRALGAAARTAVKTALMEVADKDLHGVKDAYWQGVQVRAEQSAREAFKETGYSPAILNEYWNAFGFTGFKIRWSQVRKGERTSIPFPGDAPFLQFTNGATIQVAETEDGYCIRRIRIYGLVGNKPDTRNEVEWALKPVGRGRHAAWGIEQLRRANKICAVRIHKAERGWIAAVSVRIQAEAVAASRPERWAGIDLGLNSPAVLSVPDANFSRFYGRDLYSGLWRSLDEYEARKRELVRAGKKQAARDLDDRISAKRKHINELISRQIVDDCRRLRVTGIRLEDLKGIQQFATGRLKHWPRHNLALRIEQKAAEVGIETEMVRPAYTSLTCSHCGHMEKDNRSRENVSLFLCRRCGFSRHADLNGANNIARKLERFGIEEPNLSVFERAEQPRLHRLGATTGPEHLEGRLTEAAT

SEQ ID NO: 644 - protein, 417 aa, Unknown
  Description of Unknown: metagenome sequence
MIKTATFYIADMPQEDKRLCERLCAELGAAGATMVREWYRACDEVTGERINWPEVQKRGVQVGRQAFAERGYRAELVNDLQRAEFFARFKMEFKKIQAGERASLPFPGSAPFIFLRMDPGKEKATLVQEDGTWYLRDPHFYPGGGRNEDNKREWRLKDVGRNGWGYAILAEAEKAACIRIMPDRKKRGSWVVKITVHLPDAALRKEVERQEVWAGIDLGLNCPAVLSIPDHPDGGFVRFFGNDEYARLWQRLKEYEDRKRRLNRAGKRRAARDLRAKITGVRQHINELISREIIDLCIAMRVTGLRMEDLKGLGADGSGKLKFWPRFHLVTRIEQKAHEAGLEFVKIKPAGTSQTCSACGYRDKDNRNGSDFTCKRCGFSRHADVNAANNIARGMEEFSLPTGATAPNKAQRLVIAS

SEQ ID NO: 645 - protein, 389 aa, Unknown
  Description of Unknown: Natronococcus amylolyticus DSM 10524 sequence
MHREVTTTVRVKLHSLTERKARLIEREYTAFQDAVHGGDASLYSATKQQAGKVRSNKNPREDTDQPVVLRNDCITIEHDEDTVLSSWWFKLPIYNPKRERGDSIWVPVHVPEKDTHLLTDEYIRDSELVHRDGEWYVHLVCKRSVAVADEYDDVLAVDMGAKWIAVSTFLSDRDTQFHGAEVRRVREHYKQLRKSIGKAKVRQGAQVIERIGDKESWTVEHELHQVANELIARARERNAVIVFGDMTGLRFDNDEGRYVNDKTHKMPYAKLANILTYKSHLDGRECIPVSEYDTSVTCWRCGSQNTSRGAQGRVECCDCGLDDNADKNGASNIGKRAVGKDIQSPLSTVGAAVAQPETQVVLDGTSGEMEPANSPKDVGLTLSEGSPRL

SEQ ID NO: 646 - protein, 363 aa, Unknown
  Description of Unknown: peat metagenome sequence
MSLVKVKKCYYCKVIEDLTNTKLVALQQEYDNLQHYLQTKEDLGLYSANKQQANRFYKVIKRGKKYPLSIRNDLIRIEHKPSTIAEYWIRIPVKSVKGGLWIGLIKPYEPIPTDAKICESKLYKKDNSWFLDLVVEKDIPEKLQYQNVIGIDMGIRHIATSVELANGLTKFYGKDLNRVRGHYFWLRRKLGIKKAIDTIKKIGDHEKRIANDIIHNISRDIVNQAIESNAMIVLGDIKHLRRRKKNTRGKKFNRKLAGFQYCKLTQYITYKAALAGIKVIQVSQARTSQYCRKCYQKGVRKIQGLFTCAKCGEENADRNAAFNIIYRALGYISKVGVTVNIPNARTFASVDRNAMMTREATCF

SEQ ID NO: 647 - protein, 358 aa, Unknown
  Description of Unknown: sediment metagenome sequence
MLVRKVIKAKIMDEANSRKLKALEKEYNNFQRALRGEDVKLYSATRQQAERLLRKIRKQRGKLKQKEYPLILRNDVYDVRITNNKLSKYWIKIPVYGVRGGIKLPIKPHCEIDASWKFKEAKVIRKENGWFVHITVEKEIEIKKEYENVIAIDLGIRNIATVVSTADGKPRFYGKELRRIRGHYFHLRRRLAKLKKFKAIKKIGNKERRVVDDLLHKISREIVNRAKEENAVIVLGDLKRIRKQNRGRKFNRKLNTFPYYRLSKFIEYKALWEGIAVIKVNEANTSKICSRCGSQGLRRNGKFVCSKCGVELNADYNGALNILKRALGYMSKAGADLTQPFQSHFGLILTMKKRYGRD

SEQ ID NO: 648 - protein, 512 aa, Unknown
  Description of Unknown: sediment metagenome sequence
MEKVILTITSGVEFLQPQDEQLVIKAAKWYTEARKALLYNALQKGEEGVKQAASTLSTLNFPPAPHSRLPDLLTRDVGGTLQALKERREGYAQDFSRWWEEICRVANEKGSQAVSVLKPHVNKLSSLIHQLSWNSPEWDEEAQEVFKELKQIWAVVRQKDHERLKIKWRAEVPPVPRPPRTPKFQRLVFNADGRVSGGSRSNALQIEEREDGDLYLRLQLRDPERVAKKGSYQDVWLRLVIEDEERKQMLKNFAPKYLQLRQDGKRWIAHIVIERENEFEVPQYVYGVDIGARKYLLAAVAIPLNPALPKPPNIAVPSSKFWQIVERVEAEWRKWQQLRTGKRDKEGRVVLKKRKMAWRVLKRKRRMRREVTKSMIAEAVNTFIKSLERPCAIVIEQIKNLHLSPTLQDRKSRWRQRRWAYRFLLEMLRYKAEWEGIRVIEVNPAYTSQTCPRCGERDRNARQWNLFRCTKCRFQHNADFVAAYNITVRGLMKLRTRGRIDWKILTGKPRVL

SEQ ID NO: 649 - protein, 512 aa, Unknown
  Description of Unknown: sediment metagenome sequence
MEKVILTVTSGVEFLQPQDEQLVIKAAKWYTEARKALLYNALQKGEEGVKQAASTLSTLNFPPAPHSRLPDLLTRDVGGTLQALKERREGYAQDFSRWWEEICRVANEKGSQAVSVLKPHVNKLSSLIHRLSWNSPEWDEEAQEVFKELKQIWGVVKQKDHERLKIKWCAEVPPVPRPPRTPKFQRLVFNADGRVSGGSRSNALQIEEREDGDLYLRLQLRDPERVAKKGSYQDVWLRLVIEDEERKQMLKNFAPKYLQLRQDGKRWIAHIVIERENEFEVPQYVYGVDIGARKYLLAAVAIPLNPALPKPPNIAVPSSKFWQIVERVEAEWRKWQQLRTGKRDKEGRVVLKKRKMAWRVLKRKRRMRREVTKSMIAEAVNTFIKSLERPCAIVIEQIKNLHLSPTLQDRKSRWRQRRWAYRFLLEMLRYKAEWEGIRVIEVNPAYTSQTCPRCGERDRNARQGNLFRCTKCRFQHNADFVAAYNITVRGLMKLRTRGRIDWKILTGKPRVL

SEQ ID NO: 650 - protein, 351 aa, Unknown
  Description of Unknown: sediment metagenome sequence
MVAVKTIKAKIIAPTRRKAEILEKEYQGFQDILHGQQAEIYSRTRDQALRVLRRIKAPKDRHYPLILHRASIRLERRDTKIAQYWFRFPCHGVRGGIWLAIKPHCQIPEGCSLRETKLIKRNNAWFLYIIIKKEVPEPVINPDRIVAVDLGERYLATVCGGEGIRPQFLGKEARGIRRHYAWLRRRLGELKLLRTIKKVGNTERRKINTICHQISRKIVDLAKQTGSTIVLGDLKGIRQRARGRRMNRIVSGMPYYKLTQFIKYKAAWESVPVLIVSERDTSKTCHRCGAIGTRPYQGLFLCQACGLRYSADLNGAKNIMKRAREYISLAGAAFSQPMTRALAGNPLMETG

SEQ ID NO: 651 - protein, 359 aa, Unknown
  Description of Unknown: soil metagenome sequence
MKITVKAKVTDDSKNKLEKIESEFQNYQVYLQSGCTAIVNLYSATKQQTQRALKKIKQPNQKKQYPVILRRDLIDIQKDIKFKGVYWMRIPVYPNSINIRIKTSCKYDLTEYSIRECKILKIRNEWYIFITIEKQDEPIIPPDNVLAVDLGCKNIAVTVNTINTKPNFYGAALRGIRGFYFNLRRKLGEKKASNKIKSLKNIEFLQVNHELHKISKAIVEEAKRTNAVIVLGKLKGIRKNIKGSRRMRRLINNFPYYRLVQYIKYKAAWRSIRALEISEADTSNTCFNCRTKDKKARKTQGLFQCSNCSIRTNADYNGAMNILQRGVGILSTLGGFLTYPEPSVIIDRNKMITKEPQML

SEQ ID NO: 652 - protein, 457 aa, Unknown
  Description of Unknown: soil metagenome sequence
MIKTATFWLCEVTSDQRAVLVDISKQLGAAHRAMVCEWLRLAMAGEPYGENAGKQKAREVFADTPYSNGLVNNYSHADAHPRFKKQWEAVLKGERSSVAFPGHAPFIYLGAPEQVSVELLDGGWHIVDPRLYIGDSKDNGRSITWQEGRSRNRSIAWRLDPVDNRRTGWCLGLLRDAECVSCVRLMKSDRRPGRWLAKISVELAEAASARDKEEVELCAGIDLGLNCPVVLSVPDKGLLRFFGREGDMYPRLWQKLRQYEDRKRAFNRAGHKREARDLRMNLTNVRQYINECVSKAVVDYCLANRVTKLRLENLKGLGVGATGKLKHWPRYHLQQRIEQKGAAAGLEVEYVKAAGTSQTCSVCGHRHRDNRQRSQFECLACGYTAHADVNAANNIARNLETFGPVTGSRSAQEAPVGLRFDWEGREPGLRGKSSRLQLDLGTQVSRSAEGGVINAAT

SEQ ID NO: 653 - protein, 437 aa, Unknown
  Description of Unknown: soil metagenome sequence
MDISKQLGAAHRAMVCEWLRLAMAGEPYGENAGKQKAREVFADTPYSNGLVNNYSHADAHPRFKKQWEAVLKGERSSVAFPGHAPFIYLGAPEQVSVELLDGGWHIVDPRLYIGDSKDNGRSITWQEGRSRNRSIAWRLDPVDNRRTGWCLGLLRDAECVSCVRLMKSDRRPGRWLAKISVELAEAASARDKEEVELCAGIDLGLNCPVVLSVPDKGLLRFFGREGDMYPRLWQKLRQYEDRKRAFNRAGHKREARDLRMNLTNVRQYINECVSKAVVDYCLANRVTKLRLENLKGLGVGATGKLKHWPRYHLQQRIEQKGAAAGLEVEYVKAAGTSQTCSVCGHRHRDNRQRSQFECLACGYTAHADVNAANNIARNLETFGPVTGSRSAQEAPVGLRFDWEGREPGLRGKSSRLQLDLGTQVSRSAEGGVINAAT

SEQ ID NO: 654 - protein, 419 aa, Unknown
  Description of Unknown: terrestrial-soil sequence
MSLKTVGLYLAEMPQEDKVVCKAICRDLGRAGARMVREWYRACDEVAPGEKIPWGEVQTRGVVVGKATVQEAGLRPELANEMQRTEFFARFKTEFGKILRGEKASLPFPGDAPFIYLRLDPGNAAATIEKREGVWYLRDPHFYPGGGRNQDNKREWRLKGRSRDGWEYRWLEAAEKLACVRIKPDHKKRGAWVALITLHVPQVDDRPGSPEAVWAGVDLGLNSPAVLSIPDHPEGGFVRFFGRDLYLRMWDRLDQYEERKARLNRAGKRRAARDLRAKITGIRQHINELISREIVDLCRRLRVTGIRMEDLRGIQDAATGKLKHWPRYHLMMRIQQKAGEAGLAFELVRAAGTSQTCSACGYREKGNREGALFHCLRCGFERHADVNAANNIARGMEEFDLPTGAQAMRPARRLELVAG

SEQ ID NO: 655 - protein, 469 aa, Unknown
  Description of Unknown: wastewater metagenome sequence
MTTDKQTVTKTLRFWLTDLSKEDFDLLHELSRELARCHRLFVQASLEYAFAGGTNTTERLRLARRVYQEEFGKSRFVKRFGNTYTGEIADKDFKRQMGLIQRGQKSSVSFGPGSHANIDLLTEGLQCTLVKEGDGWYITGAALTLDEDKATRAARKWGIIPQTSGGAAVKAKQHARTMRQIEQAERTSRVRLVWRDGKKGGRKGWEAQVVCRMPVTASKPSEPTVCGIDVGMHCLLVASIPTKDKATFIGGNTFGELWHEIERHCERRTILNKAHKRHAAAAQSDKISRIRKHGCELASRQLIDWCMYHHVTTIRLEDLSGIRDRCSEDENSEKARTWNRRLSHWPWYQLQQRIEQKADAYGITVEKVNPHLTSQTCSSCGYANPANREGTQFKCQRCGFERHADLNAANNIARREPGVDFDAPNTPGRAAVLSDGPKSRPKAGRSGRLVLSDNPVTPRPDTLQLDMVL

SEQ ID NO: 656-700 - skipped (45 entries)

SEQ ID NO: 701 - DNA, 26 bp, Artificial Sequence
  Description of Artificial Sequence: Synthetic oligonucleotide
ctctccacgcgcgcgcgggatgcggg

SEQ ID NO: 702 - DNA, 29 bp, Artificial Sequence
  Description of Artificial Sequence: Synthetic oligonucleotide
gcctgctgtccacactatcccccaaaaac

SEQ ID NO: 703 - DNA, 28 bp, Artificial Sequence
  Description of Artificial Sequence: Synthetic oligonucleotide
gtgctctccacgcgcgcgcgggatgcgg

SEQ ID NO: 704 - DNA, 29 bp, Artificial Sequence
  Description of Artificial Sequence: Synthetic oligonucleotide
ggtctctccacgcgcgcgcgggatgcggg

SEQ ID NO: 705 - DNA, 29 bp, Artificial Sequence
  Description of Artificial Sequence: Synthetic oligonucleotide
gtgctctccacgcgcgcgcgggatgcggg

SEQ ID NO: 706 - DNA, 29 bp, Artificial Sequence
  Description of Artificial Sequence: Synthetic oligonucleotide
gtgcggcccacgcgcgcgcggggcagagg

SEQ ID NO: 707 - DNA, 22 bp, Artificial Sequence
  Description of Artificial Sequence: Synthetic oligonucleotide
tggtgaccatgtttttgttgaa

SEQ ID NO: 708 - DNA, 20 bp, Artificial Sequence
  Description of Artificial Sequence: Synthetic oligonucleotide
ccagtccaagtttcgatgag

SEQ ID NO: 709 - DNA, 20 bp, Artificial Sequence
  Description of Artificial Sequence: Synthetic oligonucleotide
ggaaacaaaataacaaacaa

SEQ ID NO: 710 - DNA, 21 bp, Artificial Sequence
  Description of Artificial Sequence: Synthetic oligonucleotide
tataaggtgttttgaaaatga

SEQ ID NO: 711 - DNA, 20 bp, Artificial Sequence
  Description of Artificial Sequence: Synthetic oligonucleotide
gagaaggcaaaaagagaagc

SEQ ID NO: 712 - DNA, 37 bp, Artificial Sequence
  Description of Artificial Sequence: Synthetic oligonucleotide
tttcaattcccattatatgggatttctctttgaaacc

SEQ ID NO: 713 - skipped

SEQ ID NO: 714 - DNA, 29 bp, Artificial Sequence
  Description of Artificial Sequence: Synthetic oligonucleotide
gttgtctccacgcgcgcgagggcggtttg

SEQ ID NO: 715 - DNA, 31 bp, Artificial Sequence
  Description of Artificial Sequence: Synthetic oligonucleotide
ctttcaatcccacaatggtgcgattgctgcg

SEQ ID NO: 716 - DNA, 31 bp, Artificial Sequence
  Description of Artificial Sequence: Synthetic oligonucleotide
agtgcggggggaacctaggagggcagtgggc

SEQ ID NO: 717 - DNA, 29 bp, Artificial Sequence
  Description of Artificial Sequence: Synthetic oligonucleotide
gttcgcgagagactttgtgaataacaagc

SEQ ID NO: 718 - DNA, 29 bp, Artificial Sequence
  Description of Artificial Sequence: Synthetic oligonucleotide
gcctgatgtccacattatccccttaagac

SEQ ID NO: 719 - DNA, 30 bp, Artificial Sequence
  Description of Artificial Sequence: Synthetic oligonucleotide
gcctgatgtccacattatccccttaagacc

SEQ ID NO: 720 - DNA, 30 bp, Artificial Sequence
  Description of Artificial Sequence: Synthetic oligonucleotide
cgtgcgatccacgcgcgcgcggggcagagg

SEQ ID NO: 721 - DNA, 29 bp, Artificial Sequence
  Description of Artificial Sequence: Synthetic oligonucleotide
gcctgctgtccacattatccccttaagac

SEQ ID NO: 722 - DNA, 32 bp, Artificial Sequence
  Description of Artificial Sequence: Synthetic oligonucleotide
atattatgataaagcattggctatagatccaa

SEQ ID NO: 723 - DNA, 19 bp, Artificial Sequence
  Description of Artificial Sequence: Synthetic oligonucleotide
caacagagtcaccaacagc

SEQ ID NO: 724 - DNA, 22 bp, Artificial Sequence
  Description of Artificial Sequence: Synthetic oligonucleotide
agtaattactgagtcattactc

SEQ ID NO: 725 - DNA, 23 bp, Artificial Sequence
  Description of Artificial Sequence: Synthetic oligonucleotide
gcagctggggctttggcggtgtt

SEQ ID NO: 726 - DNA, 20 bp, Artificial Sequence
  Description of Artificial Sequence: Synthetic oligonucleotide
acacttcgatagaggggtgt

SEQ ID NO: 727 - DNA, 30 bp, Artificial Sequence
  Description of Artificial Sequence: Synthetic oligonucleotide
agcttactatccacaaagtcttccgcgaac

SEQ ID NO: 728 - DNA, 34 bp, Artificial Sequence
  Description of Artificial Sequence: Synthetic oligonucleotide
gaccctgagcggtgaaagccctcgacccgctcgc

SEQ ID NO: 729 - DNA, 35 bp, Artificial Sequence
  Description of Artificial Sequence: Synthetic oligonucleotide
cgtcgcacctcgcgcgcgcgtaggagatggtttgg

SEQ ID NO: 730 - DNA, 32 bp, Artificial Sequence
  Description of Artificial Sequence: Synthetic oligonucleotide
gtcgcacctcgcgcgcgcgtaggagatggttt

SEQ ID NO: 731 - DNA, 29 bp, Artificial Sequence
  Description of Artificial Sequence: Synthetic oligonucleotide
gtgccgcccacgggcgcaggggtggattg

SEQ ID NO: 732 - DNA, 33 bp, Artificial Sequence
  Description of Artificial Sequence: Synthetic oligonucleotide
gtcgcacctcgcgcgcgcgtaggagatggtttg

SEQ ID NO: 733 - DNA, 29 bp, Artificial Sequence
  Description of Artificial Sequence: Synthetic oligonucleotide
ggtcggcccgcgcgcgcgaggggggttgg

SEQ ID NO: 734 - DNA, 29 bp, Artificial Sequence
  Description of Artificial Sequence: Synthetic oligonucleotide
gtgcgacccacgcgcgcgcggggcagagg

SEQ ID NO: 735 - DNA, 22 bp, Artificial Sequence
  Description of Artificial Sequence: Synthetic oligonucleotide
gtcgtcttcgtcgccgatatcg

SEQ ID NO: 736 - DNA, 19 bp, Artificial Sequence
  Description of Artificial Sequence: Synthetic oligonucleotide
taaccagaatagcggtaat

SEQ ID NO: 737 - DNA, 30 bp, Artificial Sequence
  Description of Artificial Sequence: Synthetic oligonucleotide
ctttcaatcccattttggtctgattttaac

SEQ ID NO: 738 - DNA, 29 bp, Artificial Sequence
  Description of Artificial Sequence: Synthetic oligonucleotide
gttgagtggccacatagtgggagctgaac

SEQ ID NO: 739 - DNA, 24 bp, Artificial Sequence
  Description of Artificial Sequence: Synthetic oligonucleotide
gtattatgataaagcattggctat

SEQ ID NO: 740 - DNA, 32 bp, Artificial Sequence
  Description of Artificial Sequence: Synthetic oligonucleotide
gccgtgctctccgcgcgcgcgtgggcggttcg

SEQ ID NO: 741 - DNA, 32 bp, Artificial Sequence
  Description of Artificial Sequence: Synthetic oligonucleotide
ggcgcaacccgcacgcgcgcgcgagggcagag

SEQ ID NO: 742 - DNA, 29 bp, Artificial Sequence
  Description of Artificial Sequence: Synthetic oligonucleotide
gcagagcccacgggcgtgggggtggattg

SEQ ID NO: 743 - DNA, 28 bp, Artificial Sequence
  Description of Artificial Sequence: Synthetic oligonucleotide
tgcggcccacgcgcgcgcggggcagagg

SEQ ID NO: 744-799 - skipped (56 entries)

SEQ ID NO: 800 - DNA, 2142 bp, Unknown
  Description of Unknown: wastewater-anaerobic digestor-anaerobic digestor sludge sequence
gccttccgcgcgtggctgtcctacgtgggcgcggaggtgacgccggaggagcggcgcaaggcggagagcgcggcggtgaacggggagtgcccgccacaacgcagttacgggacttcccaagtctttgatggctttgagaacccagcgggcgcagggatgaccaacccagaacacgccgcgcaacgtcaccgcgacggcgcgggtatcctcacccgcctgctgaccgcgcactggccgtcgtcggcgcaggagcagcgcgcgcactgggaggcggtcatcggcgaggtgccggagggctgggattgcacgaggccgccgggggtgagggtttcgcaggggcgatcccattgggggcgcgagagaggccgcaatggttctcatgctggcgtgttggacaagtcctccactttcgcgaacgaggcatcgcacgacaccgccccatcgactcccgacgccgcgcgcttcgacggcctgcgcggctccgtcgccccgctcaagcccttcgcctaccccatcctgcacgcgcagaagccgcgcgagggcagctacctcgcgaacctgcgcgcgcatggcgtcggcgcgtggaatgtggaggaggcgagggtgccgttcagtgaggatggtgtcgagggcttctggccgggcgcccgaagtggacgcggcgacctgcagcccccgtcgtggggagccacagaaggggggcagcgcgatgacgcaggccgcaccccctccaacctcctgtcctacggcgacctgctcggcgacctgcaacgctactgcgacctcgacgcctggtgcgagcgcctcggcctgcccgacgccgccgccgacctgctcgaagcggggttggtctacgcgccgaagccgagcagggcggagaaagaggccgggctggaggcagacaagccgcccgcgttcggcaacgataagggcgatggccttgggcggggcatcagcaacacgagacaggattgggcgcggggcaacacgcatcccaccgcgaagcccgccgcgctctgcgcctacctcgtcgccctcgccacccgcgaggggcagaccgtgcttgacccgttctgcgggtcgggcagcacgggcgtcgcctgcgcgcgcatcggcaggaacttcgtcggcgtcgaactcgacgccgacttcgccgccatcgcacgagcgcggatcgcacacgccaagaccacacgaccggctcaggaggccctcccgctatgaccgcggacctccgcgaccggaagttgactcattccctccattctggtatactgtcagcgttccaggcaagggactcagaggaggtcgtttcagtgtacgctcgacagttttgcccccgtgtctccagcgacctcctgttcccttgcctgggcagagacgctgtcacgggggctgttcgtgtacgcgcttcgagacaagccgacccggctgcggttgggttggttgcggctactctgggccgcgaggccgggcgatcagacccggcaaacccgcgagtacaagtgtgggcagcatggggcgggcaactctgctcatcgtagtgggagctggcaagcatgatcacaggaggcaagactgatgatcaagaccgtcaccttctatatcgctgaaatgccgagggaggacaagcgcctctgcgaccgcctctgcatcgacctcggggccgccggggcgcgcatggtgcgcgagtggttccgcgcctgtgacgaaaccccgcccggtgcggcctcagacttcctctgcttgcggtgcggcttcgcgcgccatgccgacgtgaacgccgcgaacaacatcgcgcgggggatgcaggacttcgatttgccagccgggtccgccgcccctgggcgagcgcttcggctggagttgagcgcgcaatgagacaatgcgggcgggctgcggttcgcgcgtgtgcggcgactgtgcgccgcgaggacgacggtcaagttggcgagtcattgttatgcaatgaacacaggcctgcccacgggacggatgaagggcgcggtgcgcctcaccgcctgcgcgaccgtcagcgacctggtgcgcgcggggctggtcgtcgtcgcgtgggcctacgagaacggcgacctcgggctgcgggggacggaggcggcggcgactttctttcgcgagggttga

SEQ ID NO: 801 - DNA, 1339 bp, Unknown
  Description of Unknown: fungi-mycelium-attine ant fungus gardens sequence
agaatgaagatgcattaatttggaaaggtatagctttctttacaatgaagaaaacgttatttctgacaatcgcaataacaatcgctgtggtggcggtagcgttacctttcgtagcaccaataatcgcaaaagtagctaatgctggcggtagcgttacctttcgtagcaccaataatcgcaaaagtagctaatgctgacggtaattagttttgataaattgtcggcctataaggtcatgggcattagcaatttacaatatatttgaagcctgaaagcccgcctcctttaggagcgggatgaaatgctgaccgatatcttaatagctccaaagctctagtatttgtatgagtcgaggactcttcgaatgaaaatcacagttaaagcaaaagtcacagatgacagcaaaaacaaactaggaaaaatagaatcagagtttcaaaactatcaggtatatttgcaatcaggatgtaccacaagagttaatctatattctgcgacgaaacaacaagcacaaaacacatgctttaactgtcgcactaaagataagaaagcaagaaaaacacaaggattgttccaatgtggtaattgcagcattaaaacgaatgctgattataatggagcaatgaacatcttgcaacgaggggttggatactttcaactctagtgagctttctgacataccccgaaccgtcggtgattatagacaggaataaaatgatcacgaaggaaccccacatgctttatctctgggaggatgtcagaggatcaaacggctaacaataccatagataggttctcctccgaaatgatgtcctgtgtctttatcgtttaggctaagagtcattgtgtttcccttggaaatcaatactgatatatgcgcattattccacatagttacaccatttatttttacatcagcagtaccattcaaagataagctattgtctgatgtcatttgaactagttgtgtttttcctccaatattatcaattttgaagtttgttatttggtgaatatgtggtcttctaccatccatcggtgatgcaaggaagtctacaccaaaattcgtaacgttccctttatgcacattcaagttccattctccagataagataaccttaaaagcatcagttatattaaatccagattcgggaattgtaataattaaagaatttattgttcctattgcagagaatgtatcctttgctgggattggaaaaaatactggtagtgaagtcaccgctatttttttagctgcatatgcctcatagtaataactatgagtattgttattactagcgttgatatctactacaacgacgatccctattattatcca

SEQ ID NO: 802 - DNA, 897 bp, Unknown
  Description of Unknown: wastewater metagenome sequence
ctgcggccaccctgccccgtggactcccccgaggggcagcaggtgctgcggggcctctttcggcaggcgttcgcggcgttgccgccggaggcgctggagcggtgctgcgaggcgatcacggcggaggatgacgaggacgctggtgggtgatgcccacacccgccacgcggcaggccccctgtccggcacatcctcgactgggcagggggccaggcacacacaggacgcacccgccgccggcctccttcccccgcggcggtagacggacccggtcttgctcccgcgcggaccggcgacgacaggggccggggctcaactctcactcccggccccggggcccgagcaacagactacagacaggagtaacggcagtgaccaccgacaagcagacggtaaccaagacgctccgcttctggctcaccgacctgagcaaggaggacttcgacctcctgcacaagctcagccgcgaactggcacgttgccaccgtctgtttgtccaggcgtcccttgagtacgcgttctttgacgcacccaacacacccggcagggctgcggttctgtcggacgggccgaaatcacggcccaaggcggggcggtctgggaggttggttctgtcagacaaccccgtaaccccgcgcccagacacactgcaacttgacatggtgctctgacctgtacaggtttcgcgagattccttgtaggagcgtggtagacatgccgacatgcagcaactgcctggccctcactgagcgcatccgtcgactcaaggctgacgaggacgcgcacctggaacagatcgccgccctgggagcccggcttgcgcgcagcgaggccaaacttgcgcggtcgcaggcgctgtgccggcggctggcgagcaacgtcgccgcgctgggtggc

SEQ ID NO: 803 - DNA, 35 bp, Unknown
  Description of Unknown: sediment metagenome sequence
ctcgttgtgcctatgacggcctgaatgacttcctc

SEQ ID NO: 804 - DNA, 3563 bp, Unknown
  Description of Unknown: aquatic-freshwater-sediment sequence
tcgcttaaccaaagatggcgaatagagaactggtggttgtgatgcaggtgcagaaagtcgtcaaggcaaaagtcgtggggctgactcacgctaaacgccagatactcgaccacgaatacgaagggctccagcgattcttgcagggggattccaacgttgaactcgccttcaacataggcagacgagccttggggcaagtctccaaggtaggggctgtcgtgagccagcccgtaactggggcagtgccgttcagcgaactcggtagcgtcgttcaatgtccgaccccagaagccaccctttttaaagggtggtagttcacgtgcgcgagcgcctgcggcgtttagtccaatctactaataggtgctctcccatctccctaaatttcctcgccgctggagaacgcggggcatagcgaagaactgagctgccagcggtcaagctctcacgaactttatcgtcatcgggttgccactcaattggtgcttggacagccccagtccatgtttcaatcagattccacccaattggagcttgcaccgtgccaatccaagtttcaatcagttgccatgcggcagtgaccgtgactgtcccagtccaggtttcgatgagtttccattcaccagtggcagtgactgttccagtccaagtttcaatctcgtaccactgagcagctgctggtgcttggaccgccccggtccatgactcggcgagttgccattcagccggagcacttactgtcccagtccaagaatcgatctgctgccactgtcccgtggttgcattaacagtcccgctccaagactcgacctgacgccactgaccagtggtcgcgttgaccgttccagtccaactctcaatctgccgccactgtcccgtggtcgcgttcacagtcccagtccagctctcaatctcgtaccactgaacagctgctggtgcttggaccgtcccggcccatgactcgatgagttgccatgcagcaggggcggtcaccgtgcccgtccagctctcgacgagctgccacgcggccggggcgctcacggtgccagtccatgtttcgatgatctgccagactgcggaagcattgaccgtccccatccacgactccaccaattgccattcagctggcgcctgaacggttccagtccacgtctctatgagctgccacgctgcaggtgcattaatagtacccgtccatgtctcgatcacttgccagacggcaggcgctgtcacggtcccagtccaggtttcgattgtttgccaagccgcgggtgcgctgaccgttccagtccaggcctcgattagctgccattgggcaggaggtggaaccaccgtgaactgccaagtgttttcagaaacattctcacccgcagcgttgaccgcccacactctccagtagtaggtccccggggtggagaagttgcgctggtagatgttgtcggtgttgtcttggtagttgtccacgagcggcgtggagaaggtgggctcgttgtcaatctcgatcctatggttctccccaaaccacccgttgtcccactcgaaggtcacagtttccccgaccccgaagacagagttgttctctggactgtagagcctgggcctcttcggaaagaatgtgtactcgtatgtgaaaaagatagtaccggtaagagcggcgcctgttcccatgtcgtattcaaagttgtaggtcaggtcggcaagggtcctatctacaacaacgtcgatgttgtctttgtttacagagatggatgtcaaggcctccccagagctgcctgtgctcatactgacggctgagccccagtttaccccatcagcttagatcctggtctgtcgcgtttccgaagcggttgcacttcctatccaatatgccgtgaggccaacgctcttcacagtctttttgttttccggggcatagaacgtcagctccccgctggtccaagggtcaccggcagccccgctgggtttttggcccgcggtgaacatcgtggttttcagctttgtcgcggccgatgggcggaagtgataggtgatgtgcaaaaggccgcttacctcatagaggtcggaggccgcagcgctctggatgttgaggttcacattgtccccgttcgaccagttctccctcatgaaggcgctgatgtcgtggaagtagtcgaacccctctacatgctcgctgcctatgttggtcgtgtaagctcccgaggtctgggttttcgccccgacgctcgcgtacacgctcgtgctgccgtcactagtcaagatggtgtggaaaatttcaaagtacgcgttctcgatgttgtccacgcgagagctgtccaggtccgtcagataaacgggcgtcccgaaggcgaacaggttggccgagccgttgacgttggcggcccccatggcaaacgtgagtgtttttatctggtccgcgctgttgtctgaatactcatatgtgacgtaagtttcacagctgagcgcatcgtttgtttgtcctccggtagtaattgtaatatcctgatcaacgttgtagttccaggaagccgtcggccgggaaatataccagaaattgagatcgttgccggtacgggcttgctctgtccaagcatttgtggtggctgtatcgcttccgatcttgatgttaagagaaaagtcggttgaagaggcttgggaagagtgggcatggatttcgtaccagttgtccctcagcgtgaccccgtcttctgggatttcgattctgtgtgtgtaggtcgccgtgccgccagcccctatctcggtgttcgtgctccccacaaaatacctgacagtcttgatcttcgtgtccgccagctcgttctcctcatatgtgatgtacatcttggccgtgtggctctggatacccgcgtcagtgacggttaattttgggtagacggcggccccgtttgtccagtatgttgtaaaagcagaggtaaaatctgcgaccacccatgccgccacgctttccccgctgttggcggtgtactggccggtcactgggtctgcgtctgggttccggtcggtccccgcgatgttcagggtgacggtcatatctgtcacgttggcagcagtcgatgcccccgtctggacgtgatacatcacgaacaccttcctgaacggcccagccttgtccgggatgtagatggtttttgtcggggtgaacgagtaggccgtgccagtgcccaaagcggacgatgaggttccttgcctcgtatcccatgaatattggattgtgtttatggtcactatattttcgttgggtttggtgggggagggagtagccacggctaggggctgcatcgagataacgaaaacgctggctaacatcatcgctatcaatacgaatacaaagatttgttttgcctccttccgcccgaactcttcccgccccaacctaaacaagctacaacccatctccctcacctgcttgcctccacttggactatggaatgggcgcggctcacggcagagccatctctcatctctctcagcaggttcgtgaagtactcaatcccgctcgcggtgagcttgcagagctttcgaggcctcccccgggttaaacggggctc

SEQ ID NO: 805 - DNA, 2255 bp, Unknown
  Description of Unknown: fermentation metagenome sequence
cgcgttcgtgcagggcttccttgcgatccgcgcagacgtgaagcacccgcaggcggaggatggcgaggactcgttcggcgatcagtagcgagtggtattgacaagccgccccatatcatgtaaactgaaagtgtcccggcaaggacttgagaggaggtcgcgttcacaatgcacatcaataggattgcccccgcgaaagcgcgacctccgtttccttgccgggacgagagcgttgcttttcgcgggggttttgcatgtacgcttacaagacgcctcgaaccggctgcggttggttcgactgcggctactctgagccgcgaggccgggcaacgagtcgtccggcaaacctgcgcgcgccccaagcgtgcgatccacgcgcgcggggcagaggacaacggcacgtgacgaccggttcgacgtgcgatccacgcgcgcgcggggcagaggtaaccgggtcagagtgtcgtacatagggcaccgtgcgatccacgcgcgcgcggggcagaggcaaggcggcctgggcggcgctggagaaggcggagaggcaggcctcgcagcgtgcgatccacgcgcgcgcggggcagaggaggagagatagctaaagcaatgataaagaccgcgacattctatctggccgacatgccgcaggaggacaagcgcctgtgtcaactcctctgcgatgaactcggcgcggcgggctccgcgatggttcgcgagtggtatcgcgcctgtgacgaagtagatggcgagcgtatcggccccgactttgtttgcctgcggtgcggtttcgcccgccatgccgacgtgaacgcagcgaacaacattgcccgtggcatggatgacttcgacttgccgacgggcgcaagcgcgccgacgaaggcgcggcgattggagattgcatcatgagaagtggctgtcgggctgaggtttgacggcttgcggtgattgcgcaccgcgaggatagccgatggttatcaagtgctgatacagcatcgcaagcgcagatgatggtgcagagatcgtgcttgacgaagacgaagtgcagaagctcagggaggcgctggaggagcacgcgaagagcagtccgcaggactgacgcacacgccgcacctgctgacgcgcatggggacgcacggggatgcagagcgcgcagcgagaggttgccgggatgcgcttgcaatcgacgaacgttcgtgctataatggaggtgtctggagagacacggcgcggctttgcgttctatggccgcccaccacaatctgaccgtgaccatattgccctcgtgcaaacctccgcgcgtgtctctccagactgcgtaggcggccagcgcgagggcttttctttgctccggggtgatccagttcgtggctaacccaaaccactacgtcaaactcttcctcgcaacgttcgacgggcagtccgccgatatgcaggcgctcactatcggccagaagtacgtgtggctggcgctcctcgcatttgcccgagcctacagaccgtatggcattctgaacgcaggagagcacgaggggcgtcctatgcccgcgagtgtccgccgcctggctgactgggcttccgttggagtcggcactgtgagtgaggcgctggcaatctatgagaagagaggaatgataaagcaggataaccggcgcagtgatccgtgttgggagatcgtcaactgggagaagtggcaggtgtctcacggcctcgaagagtgttcgggagccgaacaagatggtgttcgggaggcgaacacacagactgtagcgcgttcgggagatgaacagcactgttcgccatctgaacgccagtgttcggcaaatgaacagcagtgttcagatggcgaacacctatctccggacgcagagtgttcaggaggcgaacacaaacaggtagaaagcctaggggcgcaagggctattggccttagtatctgacgagcaggggtgttcgcctaccgaacacgattccctagacgttaagagaacaacattaacagcagaagaaggcacggctacttctgcttctcaagtagatcaggcacgacaaatcctctgcacccttcttcgcttgcccgatggatcaatcgcgattgatgccgcgcttatggcggcctctcgtgttcatccgcgcgccgccgatgtccttgtccaagagtgtggagcacttgcggcgcgggaagctcaaggcggcaagccggttgatctacaatacctcgcctcgaatgttcgccaagcggcggagcgacttgagcag

SEQ ID NO: 806 - DNA, 482 bp, Unknown
  Description of Unknown: wastewater-anaerobic digestor-anaerobic digestor sludge sequence
gtgcgggtgtggcgctcgcaccgggctgaatatcaggaggcgagcggcatgcaggaggcgctgatggtcgtggctgggatcgtgatcgcgctcgcggcgaccggatgggtctggttcgcgctgtgtatgcgggagggctagattgaaggcaacgaccatcacaaagagcctccgcttctggatcgacgaaccgcctgagcggtgccgtctcctctatggcgtcagcgatgaactcaccgatgcatacaacgctatccccgagtactggaagaccgatgtccgcaaggtagccatccgaccgtctacacagccggcgggacgtatcccgtcggccgcgcccgactgcacgggcgaggcagtgaaggcgtcagacgttgacgctgagctgcaacctgcgcgcacgccggcagcttgtggaggtgatccatatgccggcgagtgagcgagtggagaggtgtggggccctggtctgtacggggtag

SEQ ID NO: 807 - DNA, 350 bp, Unknown
  Description of Unknown: solid waste-landfill-landfill leachate sequence
gaccttaatgctgcgaataacatcgcgcgggggatgcaggagtttgggccttgtgtccagtcctccgcgtcagacaacactatcgagctgcggttcgatggtgcggggcaagaacctgccctggggcgggcaatgcgattattcgcatgagtccgcaagtctctacaagcgagtgcgaccccgagatggtttggaggcaaccagtgaccatacaggagcgagtctaccagacattagccgcacgcaacatccgtccatcagcgcacctgctgcacgatatgggccactacggcgaggctcaggcgctcagtcagaaccctgccgagaacccgttgcagcaggcgctcaga

SEQ ID NO: 808 - DNA, 1032 bp, Unknown
  Description of Unknown: solid waste-landfill-landfill leachate sequence
atctaccgtatgtgccagatagtccgcataaagcgcctgcagatggagcagtttcggagagcgcaggccagggcggaagcggagatggactggcgccgtcaggcgcatcgcaaatggcagcggttgcgcgaagcgatggacagccggtagtcgtcttgccgtggacctctcccgccgcgactgacatgcccggaggaaactctggccccccccacacccggggctccgatcacagccggggccccggcccacaggccgcacccccgcgttggcggggacaacgacataagaggtaggccgtagacgcagaggcacagaggacgcgtgacgaggggcgctgcgacaactgcacgggaagcagtgacgtagcgcccaacccaccataatcgaggagcaagcggaccgtggatactgcagcgaacgagacgacacccaaggctctgtgcttctggctcggcgctctgagtgatgccggattcaagctcctacatgagctgagtcgccaactggcacggtgccatgcgacgttcgtgcaggcggccctggagtatcaggcagacctgaacgctgcgaacaacatcgccgggcgtgacccggcgacagactttgacacacccgatcgggctgcggttcggtcggacgggccgaaatcacggccccaggcggggcgggcgtcgcgactggtcgcggcgtcaaccccgtaaccctgcgcacctagacatcggtgttggcacatttctggtctgcgcagcttgcacggaaagcagttgacgtggcgccccacccaacacacaggccattccccgcgttagcgggttggcaggcaaggcgtgcaggggccgggctggacacccggccccactattccacaggaggcggacgatgccaggcacggagacggtgacggtgacaatccctgtggactacgtgacggcccgccggatagccgagctggagaggaaactctcccaggccaggggcgaggccaacgaccaggagtgcgacgccaccttctggcgggagaggtgcgag

SEQ ID NO: 809 - DNA, 3022 bp, Unknown
  Description of Unknown: Natronococcus amylolyticus DSM 10524 sequence
gcggaaccgtgccgtttcatcgtcgacgcgaaacacgactaacccgcggccgcctgcgtgaagcgcggttcgctcgggtaatcccgacaccggctccgtcggctcgatcgccgccgggtcaactacctgaatctcgtcgctcatgttcattgtaccgatggggtcgggttacagaggttcgaggagaaagcccacgacttcagtcgtgggatgaatccgatcaaatacgacacaatccatcctcaatagccgaccgaaggttgatagaatcataacatctaatatagattgacgtctatataacagtatgccacgggggtacagccgagagcgaacgtcggttcacaacctccactaccacttcgtgtggtgtccgaagtatcgtaaaccggtactgacagacgaggttgccgaccgcctcgaacacctcatcgaggagaaagccgacgaactcggacaggtcaagggctacacctcgcggaaccttcgcgacgagtttgatttcggcctcccgtcgctgtggacacgctcgtacttcgtctcctcggcgggcgaagtgtcgagtcagaccatcgaggagtacatcgaagcacagactgggcaatagcgatgcaccgcgaagtcactaccacagtacgtgtcaaactccactcgctcaccgagcggaaagcccgcctcatcgaacgcgagtatacggcgttccaagacgccgttcacggtggcgacgcgagcctctactccgccaccaaacaacaggcggacattcagagcccgctatccacggtgggggctgccgtggctcagcccgaaacgcaggtcgtactcgacggaaccagcggtgagatggaacctgcgaactccccgaaagacgtgggcctaaccctcagtgagggaagtccacgactttagtcgtgggagaagtcacgtctgtcggatgacccacgggctcgcggttcgagccgtcgctccgccgctatacctcccagggttcgccggtcgtctcgccgaacagctcccgcatgagcgtgacgatgctttccggcgggaactggccccgttcggtgacgatcgcgtcgacgtgacgcggcggcgtgacgtcgaacgccgggttctccaccgtgagtcctcctcggagtcgtctatctcgtcgtcgccgtcgtcatccgagtcgtactcctctccgtcgtactgctcgtcgtctccgttttcgctctcgtcttcgtcgtcggccaccccttcgttgtcatccgcttcgccctcctcatctccgtcgtactgctcgtcgtggtcgtccctctggtcttcgctctcctcctcaccgtcgtcgtcatcctcgtcgtccccatctccgcgatcatcgtccgccgtttcctcactttcgtcctcctctccatcgtcttcggcatcgtcgccgttttctccatcaccttcgtcaccctcgtcgtcctcgccagtctcttcgtccccatcatcctcctcgcgaagcgcgacgagactgtcctcgtgttcgacgtagagcgtttcgtcgctgatacccaggacgttgccgactggcagctccccggcttggatcgcccagcgctcgcttccgtcgtccttgtcgagggcgacgagttcgccgtcgtattctccgtacgtcgcatccgtccccctgaagtagacgtagacggtgtcgccggcgatgatcgcgcggccgacgttgcgagacacgtcgacaccccagtcgtcctcgtcgccgtgataggcgcttcccgtgagctggtcggcctcgtacccgctgaggtagcgctccttgccgagcgtcaccgagatcccctccgccgacaccttcgcaatatgctcgccggtctgtgcgtcgaggagcacccgggcgtagaaatcgacccggctcacgacgacggcggtcgacgtcgcccgtgcctgggcgcctccggtgtaaaaattcgaatcccctcgccagacctcatcacccgtatcggggtcgagtgcaaccgttgcaccgccttccagatcccccgcgccggcgtagacgacgccgttcgccgcggcggtcgtatcgaggaagtcgtactcctgttcgccctcgtcatcgtgttgggtttcagcggtgagcgtgtcgatctcccatcgcaccgacccgtcgtcggtcccgagggcgtacagcgtgccgttgacgacgacgaagacgcctccgtacgcgacggtctgactctgaatcgaatcctccggctcgaactcggtctgccaccggacgcttccgtcggcgatgtcgagcgcgaacagttcgtcgccggtaacgtagacggtgtcgtcgacaaccgacggcgcgttcgcgtcgacgtcggtgttctcccagataatcgaaccgtcggcgacgtcgagcgcgacgactccgttcgcattcgtcgcgtagacgacgtcgtcggcgacggccacgccggcgtctcgtccgaagccgaagtcgaccgaccaggctgcctcgggcgcgtcgccgtcgagcgcggtcccgtcggggacgtacctcgcgtgcccggcgtcgccgtcgaacgacggccagtcctcgtccatccctgggttcggatcgcggtccgaatccggtagatcgtcggtcgactcctccccggcaccgatcgacgcgagggctccccctgcagtgagcgttgcaccggtcgccagcaccgaacgccgtcgccacttcgtcatacgggtgtcgacgacagaatatcggattactatccagttgctacggctgacttgtccttcctgcaactgtttcagacggacgagcaccgagcttactcgacggaacggaaccgacggcatcgaccctcgaagacggactcgcgggctcgggcgaagcggcttccggccgttaccactcctggccggcgggttcggcctgccgtggttccccctcgtcctcggacgtcttctccccgcggacgacgaagtacgcgattgcggcgaccacgcccagcgggaagaacaggaacaacagcccggcggtgccgagcgcccagag

SEQ ID NO: 810 - DNA, 3403 bp, Unknown
  Description of Unknown: aquatic-non marine saline and alkaline-hypersaline sequence
gcagtcgttgcatcgatctcccgactcgcagctggcgagatttcgtattcggcccgtccatcctcggcagtgaggttctgtttgattaggtcagcccgctcgttgaactcgacggcggtgctggtgtcggcgtcgtattccggatcgcggaagtattcccgtggcgtttcgggtttgcggtaggcggcgttggggttgtcgcggttccactctctgttttcagggatctcggcgtcaagctgttggtggaagaactcgatagccgctgccattgccgccttgatccggtgttcttcgggtgggtcgacggcgagttcggcttcgagttccgagtagtcttcatcaagatagtcctgtttggtcttggtgggagtcgtgtctgtctcggtcccttcccccgtctctgattcagtctccgtcgactcgtcggtgggtgttgcggtgtcgtcttcgtcggcgtcggcgtcttgatcgtcgctagttgctgtggtttcggcagtcccgtctgtgttggccgctgtctgcggttcgtctgtgtcggtggtaggatgtatcggcttcggcgtccgattgctcaccagccgattctgcggcgtctgtgtcagcggcagtctgtgcgggggcttcgtctgacgtgttcgaggtgtcggccccatcacttccattttcactctcagcactttccccaccttcctcacccgtggttgctgggctgtcgtctgcagtctcggtgtcgattgattgctcaccgtctccgttgtcgcctccatcatcgtcatcgtcgttgtcgtcggtggtttcaccgccgagtttccgggtgatctctgggccctcgtctgtggcggggtcgttgatcacatactggccgtctgactcaaacgccggagagtagatctcgcctcgtgagactgcatcctggagtatctcttcggctttgccgagtggcttcgggtctgctgaataagattatctcatgtatggtggttgcgactttgtatggcttcgaacgcctgagtatattatttttatttgttaatattgcagttgtaatataaataagaccatgaagaatacgatactagagataattacgacgcgtcgaaaccaaccaacacggaagcaccagtattgctctcgatccgacggatcaggatactggcacctcatctatgagtgggtagacggttcgtggcagatcgtaagccgcgacccactcgacgagatcgagatcgacatctccaactcgcgtagtgattgcacaccaaccccactcgttgagtgtcctgtgtgtggtcggactggacttcccgaacggatcgcccagcacaactgtacaccaaggtcgacacagtaagctaggagtcaaagatacaaccaatataaacacaccaagccattaccaacaaaaatatatggttacgggtgttgtataactagtactagttgttattcacgcatctccgctcgctctcgtaggctgttttcggtgctatcatagagtataaattggctatcgactcatctggtgagttcctcagtcgaccgcccgacgcggcgatcagtggtgagaggaacagcaagacagcagaagagtgagattgagaactaagatagagcacctcgcacctccaaacagatggacgaccagttccgaacacgctcgtgtttcgtcggaatcggcgccaccggtgccgagcgcatcggtgacggcatcgaacgtcgtgacgcaagtgccacgatggttccggacgaagttccggacccagccgacgccgtcgtcgactgcgttgccgcaccgagggcaggttgtactctcccagaactgcttgagtcgccgctcgatggccgcatcgagcggctccgtgttgattgtgatcacgcccagatcgacaagctggcgaagcatccggccgaaggctggatctgaggaggacatactccctcatttgacaccgtagaccgtagctatatggactttccacgtttctacataagagcgcaacaggttaaccaacaaatctatcttatactcgttttgttggttaacacaaggcgctcttatgtgaaccacctcgcggtcaagccccgaggcactcgccttgcttatctgtagacgtggaaatgttcaaaaagtggttcgataccctcaagagatcaccagccggccaacattcgacgtcccatacaggtactaagtgacgctagcactgattgtcagaaaaaaatttatgaaacggtggtgtggccctccgatttaactcttgcaaggctaagtccccgtcctcaaggagcaacgcagggagcgtagcgaccgagtagcgcagtagggcggggatacagccgacacgaaattaggcaccccacgaaatcgcacaccctaaccaaagaattacatgattgtcacccgatagtggaagtgaacccacaatggaatacgacctcgatacgggagcgcactcaacgtactccctgcactaccacctcgtcctcgtcgtgaaatatcgacgcgaggtgttcaccgaagaacttcatgttcaccgaagaacttcaagggttcttccgcgaggtcgtgagcgggttcgctgacaactacggcgtcgaaatcaaaaacctcgaagccgaccgaggccacgttcacctcctgttcaaagccacgcccacaaccgacctcaccaaattcatcaacgtcctcaaaggcgcatcggctcgtcgcatccgcaatgagtacggcgagcaaatcggggacaaactgtggggtgactcgttctgggcagattcgtactgtctcatctcgacgggacaggtatcgctggacatgctgaaagaatacgtcgagaaccagcgggagcgtgacgacgaatgaaacagactgccgagaaaacggtcgtggcaaaaatcttcaccaacgacctaacgcagtcgaaacttgacgccatcaaccacgagtatgaggcgttccagcgatacattcgtggtgacgaggaagcagatctctactcggccacgaaattgggtaaggacatcgcgtgcccactatccagtctcggcgcagtctgtgaacctgtgctcggaccgagcggtgctgaccaagcctctgccacggtatgcttgcgagccgacttggaagcccctgcctcaacgaagcgaaccgttaggtgagcgaagtaggcaggggtagttcacttgaaattgctgaaatggtggggggtgttgaggagcctaatattggttcaagacccgctcaccaacaagactaggcgttcggtcgatcagcactgatgcgctcaaaatcgatatctgcgaatcgagtcgtatccttgataacttcgactgcgatctcggtatcaacttgcagctggtactcccatgctggcccaccgatcgaacctgccgtcaccttttc

SEQ ID NO: 811 - DNA, 1156 bp, Unknown
  Description of Unknown: aquatic-marine-marine sediment sequence
ggcaggttgtattagacggattttatttaaaattgtttctggtaggttgttttctctgggtcgttgtgaaggttggaaaatctgttaggggtttataaagatcttcacggtttggttggtggtttagaaagtgttaaaaatcttataggtttagatttctttactgggtggtgtgtgttgaagacttttgtgatctatgatatctccgatgatcggatgcgggaggggttgagggagcatattaggaactatggtcttcggcgggttcagtatagtggtttcctgggggagatgagtccccatgatcggtttgtcctttctcgtgaggttgatcgtgaggacctgagggcactttacagcgatgtgatgaaaaccttgcatgatgaggccttttatgagggcgtttataacccagaggaggtcgagtatgctataaaacaggttaagaagatgattgaagaatttaaaggaagttaaaaccgcatattgttaggattcttctttttacctattctcggcgagaaatcctcccactttagtggggggatgaatcgccgtttaagtttaaatatcagaaatcttatatttgtttcgggcgagtcgcccatgaaggttaagaagacaattaaggctaagattcttgagcttcggaagggcaaggaagagcttttgaaacgtgagtatgagaattggcaacgctacctaagaggcgataaaacggttccgctttattctgcgaccaagcaacaggcagatatactcaagcgggctatggggctagtctccgtagcaggggctggattgacacagcccagaactcggtatgatgaagccagaaggccgaaaaaccgagaatctccccacttaagtgggaagagtgtcaagagttattccttcaagttctaagatgagtttctcgcataggttgtaggtcttcttggctctgttggtggcgtcctctgcatcgttcttgtccatgacctcgttgggtggtgtgagggtcttttcatccccgtataggcttggctcccttttcttgaagaggagtttggaggattcgcgtaggaagtctatctcggttttgaaccagtctgggaatcagtctctgatgtcggagagaaggtctgatacctcgtggattttggggtactcgatt

SEQ ID NO: 812 - DNA, 1589 bp, Unknown
  Description of Unknown: Halorubrum tebenquichense DSM 14210 sequence
cccttccggtcagttgaaccgtagatcgaagcggaaaattaagtcaagtccaaatgttggtcaccgtcgatactggcaggtagaacaggtttatagccggatattgatgtctacacaccccgttctagttatggaagcgacagcactgaacgctactttccttcgaagaaatcatctatttgtgcgttgacaacagatttgattagatcgccttcattgtctgcctcttcaatccggatgtcagctcgaagagtttcagcaaccacacccggatcatcaacaaacgtgtactccttgtgaacgacctcgtcacggatctcggcgagtgcttcgtcgtcgacgccgtggtcgtgtaatctcgattcgaggcgatcgatcgaatcccgcgcgagtgccgcctcctcgtcctcatcaggccgatacgtctgtggatcgcccatgaagtggcccatccgtcggtggacttgaacttcgaggagtgtgggtccgttcctgtcccgggctctgccgattgcgtcagcggcagtttcgtagatggcaacggcgtcgtcgcggtcgacgcgaacacctggcatatcaaacccggctgctctgtctgacccgtcttctacgtccgttacagcggtagcaaggcgaaagcccacccgttcacgggtgggatgaagccgacaactgggaatgtatccacgttcgtagccacggcttggggttgatatttgcgtaacatctttcgatgagttacttctatataccgacgatgcctcgcgggttcgaccgagaacgtaccaacatccacaaactccagtaccacttcgtctggtgtccgaagtaccgcaagtcggtactcaaaggcgaggtacgccatcgactcgaagaactcatcgaggacaaagctaacgaactcgaccaggtcaagggctactcctcgcatcacctccgtgagaagtacgactttggcttgccctcgctgtggacgcgctcgtacttcgtctccagtgggggtgacgtctccagcgaggtcatcgaggagtatatcgacgcacaagcgggtgaataacgatgcaacggaacgtctcaaccacggtgcgggtcaagctccactcgctgaccaacagaaaatccgatatgctggcccgtgagtacgaggcgttccaacgcgaggttcacggcggggatgccgacctctactccgcgacgaaacagcaagcggcctcgggcaagttttcgaaaccgctgtccgaggcgggggctgtactggcacagcccaaaacgcaggtcatcgtcgaacgtgacgaggaacctgcgaacctctcaatttctgtgggctcaacccccagtggaggaaccccacggctttagccgtgggaggatgtcagacggtctttgggcatgctgattgcccagtcattatcctcgacgacgaatacaactggtaggttgtggacactcgcgaaattcagcgattcgaggaacgcaccctgatcgatcgctccctcaccgaggaacgcgactgccactgcgtcagtattgcgctttttggccgcaagccctgccccggctgctggtggacatccctcagcgatgatgcc

SEQ ID NO: 813 - DNA, 1180 bp, Unknown
  Description of Unknown: aquatic-marine-deep subsurface sequence
cgagaaagctaaggaagccagagaagcagagaagctagctcagaaacaagccgaactggaggctaaagaaaaggcaaagagagaggccgaggaggcaaaaagagagactgaagaagctaagaagaccaaagctgaaaggatgctagccgagaaggaagccgagataagccgtctggaagcggcattatcacgcggagatatacgactgggtaaagttatctatcattcctggaagctgggctcagcacgagccactaaggaaaaggccagacgagacgccgagaaagccaagcaggccaaggcggctcagcagtaggccgagcgggaagcggagcggggcgctaaggagaaggcgaagcgagaggctgaagaggctaagcaggcactacaatcgctgatagattttgaccaagagaaacaaattgaagaatgtctaaaagaggtgaagagcatttgtgaagaactaagggcagggaaagctgagacaaaggaagcaatacaaaggcttttagatatttcagaaaggattcccgagtagatattccccagctaatatcagtaggctgatgtgactgggcttcatccgtggcaacctatttgagtttgataattcactacctcagtgtacattcaggcggactcctaaaattacagaatcaggctgagaaagccccctgcttcagcggggggatgaatcagcccttccctcctttcccaaagtataccaatatatgtttatgggacaagaatatagacataacagacattcgatctctttggtcaactatcatctcatctggattccgaggcgtcggagaaaagtattggtgaatcaggttaaggatagacttgataaactgcttaggcaaaaagctgaagagcttggtataggagtgatagctttggagataaacccagaccatgttcatctttttgtgaatgctatgccggatttggccattcatcaagtggcctttccttatcgcggtctttttctttgccattcttgcaaactccactataatgccgaccttaatggtgcccgtaatattctaaagagggctttggactatatgtcctcagccggggctgctttggcacagcccgtaactcagtctctgaactgagaatcctccgccttcagacgggggagtgtcaactgcaggaacattactggcaa

SEQ ID NO: 814 - DNA, 198 bp, Unknown
  Description of Unknown: metagenome sequence
gggcagagaaggtagatgcagtagaggcaggagaggattggcctactcatgattaagacagcgacattctacatcgccgatatgccgcaggaggacaagcgcctctgcgaacgcctttgcgcagaactcggagcggcgggcgcgacgatggttcgcgagtggtatcgcgcctgtgacgaagtgaccggcgaacgtatc

SEQ ID NO: 815 - DNA, 3685 bp, Unknown
  Description of Unknown: aquatic-freshwater-sediment sequence
aagctgtttcacatggcaagagatttttgattcgagtcgtgcggccaggtcgggctgattgaaaagaaggagatgggtttttatcgctaacttttaccttaaaactgcttcacaaccgaaaatcgcttaaccaaagatggcgaatagagaactggtggtcgtgatgcaggtgcagaaagtcgtcaaggggaaggtcgtggggctgactcacgctaaacgccagatactcgaccacgaatacgaagggctccagcgattcttgcagggggattccaacgttgaactcgccttcaacataggcagacgagccttggggcaagtctccaaggtaggggctgtcgtgagccagcccgtaactggggcagtgccgttcagcgaactcggtagcgtcgttcaatgtccgaccccagaagccaccctttttaaagggtggtagttcacgtgcgcgagcgcctgcggcgtttagtccaatctactaataggtgctctcccatctccctaaatttcctcgccgctggagaacgcggggcatagcgaagaactgggctgccagcggtcaagctctcacgaactttatcgtcatcgggttgccactcaattggtgcttggacagccccagtccatgtttcaatcagattccacccaattggagcttgcaccgtgccaatccaagtttcaatcagttgccatgcggcagtgaccgtgactgtcccagtccaggtttcgatgagtttccattcaccagtggcagtgactgttccagtccaagtttcaatctcgtaccactgagcagctgctggtgcttggaccgccccggtccatgactcggcgagttgccattcagccggagcacttactgtcccagtccaagaatcgatctgctgccactgtcccgtggttgcattaacagtcccgctccaagactcgacctgacgccactgaccagtggtcgcgttgaccgttccagtccaactctcaatctgccgccactgtcccgtggtcgcgttcacagtcccagtccagctctcaatctcgtaccactgaacagctgctggtgcttggaccgtcccggcccatgactcgatgagttgccatgcagcaggggcggtcaccgtgcccgtccagctctcgacgagctgccacgcggccggggcgctcacggtgccagtccatgtttcgatgatctgccagactgcggaagcattgaccgtccccatccacgactccaccaattgccattcagctggcgcctgaacggttccagtccacgtctctatgagctgccacgctgcaggtgcattaatagtacccgtccatgtctcgatcacttgccagacggcaggcgctgtcacggtcccagtccaggtttcgattgtttgccaagccgcgggtgcgctgaccgttccagtccaagtctcgattagctgccattgggcaggaggtggaaccaccgtgaactgccaagtgttttcagaaacattctcacccgcagcgttgaccgcccacactctccagtagtaggtccccggggtggagaagttgcgctggtagatgttgtcggtgttgtcttggtagttgtccacgagcggcgtggagaaggtgggctcgttgtcaatctcgatcctatggttctccccaaaccacccgttgtcccactcgaaggtcacagtttccccgaccccgaagacagagttgttctctggactgtagagcctgggcctcttcggaaagaatgtgtactcgtatgtgaaaaagatggcaccggtaagagcggcgcctgttcccatgtcgtattcaaagttgtaggtcaggtcggcaagggtcctatctacaacaacgtcgatgttgtctttgtttacagagatggatgtcaaggcctccccagagctgcctgtgctcatactgacggctgagccccagtttaccccatcagcttgaatcctggtctgtcgcgtttccgaagcggttgcacttcctatccaatatgccgtgaggccaacgctcttcacagtctttttgttttccggggcatagaacgtcagctccccgctggtccaagggtcaccggcagccccgctgggtttttggcccgcggtgaacatcgtggttttcagctttgtcgcggccgatgggcggaagtgataggtgatgtgcaaaaggccgcttacctcatagaggtcggaggccgcagcgctctggatgttgaggttcacattgtccccgttcgaccagttctccctcatgaaggcgctgatgtcgtggaagtagtcgaacccctctacatgctcgctgcctatgttggtcgtgtaagctctcaaggtctgggttttcgccccgacgctcgcgtacacgctcgtgctgccgtcactagtcaagatggtgtggaaaatttcaaagtacgcgttctcgatgttgtccacgcgagagctgtccaggtccgtcagataaacgggcgtcccgaaggcgaacaggttggccgagccgttgacgttggcggcccccatggcaaacgtgactgtttttatctggtccgcgctgttgtctgaatactcatatgtgacgtaagtttcacagctgagcgcatcgtttgtttgtcctccggtagtaattgtaatatcctgatcaacgttgtagttccaggaagccgtcggccgggaaatataccagaaattgagatcgttgccggtacgggcttgctctgtccaagcatttgtggtggctgtatcgcttccgatcttgatgttaagagaaaagtcggttgaagaggcttgggaagagtgggcatggatttcgtaccagttgtccctcagcgtgaccccgtcttctgggatttcgattctgtgtgtgtaggtcgccgtgccgccagcccctatctcggtgttcgtgctccccacaaaatacctgacagtcttgatcttcgtgtccgccagctcgttctcctcatatgtgatgtacatcttggccgtgtggctctgggtatccgcgtcagtgacggttaattttgggtagacggcggccccgtttgtccagtatgttgtaaaagcagaggtaaaatctgcgaccacccatgccgccacgctttccccgctgttggcggtgtactggccggtcactgggtctgcgtctgggttccggtcggtccccgcgatgttcagggtgacggtcatatctgtcacgttggcagcagtcgatgcccccgtctggacgtgatacatcacgaacaccttcctgaacggcccagccttgtccgggatgtagatggtttttgtcggggtgaacgagtaggccgtgccagtgcccaaagcggacgatgaggttccttgcctcgtatcccatgaatattggattgtgtttatggtcactatattttcgttgggtttggtgggggagggagtagccacggctaggggctgcatcgagataacgaaaacgctggctaacatcatcgctatcaatacgaatacaaagatttgttttgcctccttccgcccgaactcttcccgccccaacctaaacaagctacaacccatctccctcacctgcttgcctccacttggactatggaatgggcgcggctcacggcagagccatctctcatctctctcagcaggttcgtgaagtactcaatcccgctcgcggtgagcttgcagagctttcgaggcctcccccgggttaaacggggctc

SEQ ID NO: 816 - DNA, 1615 bp, Unknown
  Description of Unknown: Halorubrum sp. Atlit-26R sequence
gcgaagcgaacgaacgaggagcgcagcgagtgtgcgccgccctcgcggctggggctttggcggtgttttctgtcgatccgttggcggctatttataaatgagcagctggggctttggcggtgttttctgtcgatccgttggcggctatttataaatgagcagctggggctttggcggtgttccccgccgatccagaatcagcaatttataagcgagcagatagggatatagcggtgctctctgccattccgcagtcagccatttataagcagtcggcggtagttcagtacgtctctttcccccaccgcaggtcgtcgtaggtggcctgctggtcgctgccgagccgctcctcgaacttccggcggagcgcggccttctcggtcgcggagatccgcgccagctcgtccgccttcgaaaccggctccggcgggcccagcccgcgaccgacggcgacgtcgacgaggcgcttcgcctggtcgggcgagaaccactcccgctctaacgacagcgcgacgacgaactccccctccccgagccggtcctgggcccgggtcttgaacggggcggcgacggcgacctccagactcatgtgcgaatcggggggcgccgacggcggtaaacctaccggaccgcatcccgcttcagggcggccgcgacgtccggcttatagcggtagcgaggcgaaagcccacccgtttacgggtgggatgaagtcgacaactgggaatctatccacgctcgtagccacggctggggttggatgcttgtgcaacatatttaggtgaagatactctatatactgacgatgcctcgtgggttcgacagggaacgtaccaacgtccacaaactccagtaccacttcatctggtgttcgaaataccgtaaatcggtgcttgagggcgaggtacgcgaccgtctcgaagaactcatcgaggagaaagccgacgaactcgaccaggtcaagggctactcctcgcgccgacttcgggacgagttcgacttcggcttgccgtcgctgtggacgcgctcgtacttcgtctcaagcgcgggcgacgtgtccagcgaagtcatcgaggagtacatcgacacccaagcaggtgaatagtcatgcaacggaacgtctcgaccacggtgcgagtcaaactccactcgctgaccaacaggaaagccgacctactcgcccgcgagtatgaggcgttccagaccgcagttcacggcggagacgctgacctctactccgcgaccgaccagcaggcggccttgggcaagttctcgaaaccgctgtccgaggcgggggctgtactggcacagcccgaaacgcaggtcatcgtcccacgtgacgacgaacctgcgaacctctccgtgtccgtgggttcaacccccagtgggggaaccccacggctttagccgtgggaggatgtcaggcccggcaaccgttatgtcgggccagcgagatggcgcacgtatgaagacccgcccgctcggcgacaccggccacgacagcaccgtcatgacgttcggcgcgatcgcgctcaactggctcgaacaggagggcgcgaaccagctggtcgaacacgtcctcgactacggggtcaatcacttcgacgtggccccg

SEQ ID NO: 817 - DNA, 2223 bp, Unknown
  Description of Unknown: aquatic-freshwater-freshwater lake sediment sequence
tccggggtgtatcttgcttctggtttgtatgtgaatgcagggaccatgtctgcgaatgtgtctgggaattggattgaggcgcatgtgatgtctggtgctttgaccatcatctctggtggcgtgtttgtctctggttctatcacagtgatttctggtttgattggtgcgtatgtttctggttttgtcactgtgcagagtggtgtgattcaggttctatctggtgtaggtgttcttacttctgtttctgggaatattgtttctattgcttctgggttgtatgtgactattcagtctggtggtgctgtttctgttcctatcacttctggttctgtgattgtgtctgggaatattggtgtctctggctgggtgagtgtgcagagtggtgtgattcaggttctatctggtgtaggtgttcttacttctgtgtctgggaatattgtttctgtcgcttctgggttgtatcttgaatctggtcaagagattatctggcgtggtgtgcaagtctctggcactgtcgctgtctctggtttgattggtgtgcaatctggtgaggttcatgtgatgtctggtgctttgaccatcatctctggtggcgtgtttgtctctggttctatcacagtgatttctggtttgattggtgcgtatgtttctggttttgtcactgtgcagagtggtgtgattcaggttctgtctggtgcgggtgtggttgcttctgtttctgggaatattgtttctgttgcttctgggttgtatcttgcttctgggttgtatgtgaatgcggggaccatgtctgcgaatgtgtctgggaactgggttgagacgcatgtgatgtctgggaatcttcaggttttacagacatctggttttgttgctcttcaatctggtgaaattcatataatgagtggttcagtgactatacccgcattgacaacagttgttgccaccccagcaacaaaccccatgctgattaccggtctttcaggaggacaaattttgacttcaagtgtagtaataagcgctattgtgaaagcagtatcactaaacagtagtgatatgtatattggtggagcatcgggggtaaatagccctccgtattctggtggagggtttgtgcttgctcctggtgaagctattaatcttgatgtcgcaaatatcgggtatgtgcgggcctgtgcagtgatgagtggtgataaagtatcatggattgggatagtataagaggcaaatatggttaaagaatttctctttgaacagttttacacagggacaacaggtgtcgatacagcgtatggagtaaattggagggcaacgacattcacgatagggactgttggcgcgaaagcgtctcattatgcgacaagcataggatggcgagggcaagattttccaaccattcgtttcagcgataatgttgaaacagtccttgaggaaaatttcaatatctccgaccaagacttgttttctatatttcgggcagaaaacaacatggtaatttagattgtatactgcggaacttgacctgcccataaatcttaaatacctataggtgtatataagatttgtggcacagaaaaccatcaccgcaaaaatcgtagcaatgaccgctacgaaacaacaaatactccaaaccgagtatgacaacctccagcattttctacaaactggagaagaccttggagtatactcagcgaacaaacaacaagccaaaagaacaagtttcaatgccgactacaatggtgcattaaatatcttgaagagggcaacatcctacatggatattgctggggctgtgagtgaaccagcccgtgactggggcaacgacgaccagacctcagaagccacccaactttttgagtggtagttcactaatgtaactgggaataagaaaatcattgaagtatttggtgaacgatggcacactggggaaaagattccatatagacgaactgagattgggaggaaaaaaatattcgaagaaaatgggtatgctcttttgataatatgggattatgaattaattgatgaacaaaaagttatagaaaaaataaaagattttgtctaaattagacaaaattaaatccttcctgtttcgagtactattgttgttgtggttgtgattcccgagtgagtatatgttttagtaacagttccattcacagtgacgctttgactccaatatgaaccagcgagttcgattccacccacgagcagatgagcgtagag

SEQ ID NO: 818 - DNA, 2586 bp, Unknown
  Description of Unknown: Haloarcula quadrata sequence
taccccaacaccggcgccaacagaagcaccaactgcgaccccgacgccgactccaactccagatccagtaatcgttgaagtcggcgaatgggggaagatagagcagaacggtacagtggttcggtttcgagtggttagctatgacatcacggaatctgttgaagaagccgatggagagacagaagagccatctgaagggtataaatttgtagttgcagacgtacatatctctactgatcccggcaatgaagttacgattcgaaaagaccagtggtcgtttactgaacttaccgataagaagcgcggccctgatggcgtgaccaacggaattagagagccgttcccaaacaagactgcattacagggtgattcggttcgaggaactattgtttgggaagtaaaatatccgtctgatgggcagttcgaggtggagatacataaaaacaaaacaggcagggctggtaaagtgttaatataacagagtagcttgataagagttttacatattatcgtggataatttatgctcgaaaggggttcaaaaacagttctgctcggagataatttttgagggctgactgtagttgtggaagtggtccatcgtgccgggtgatgctctgtataattataccatgtagcatcgctaggagaaattcagcggtttcttcgggggagagagtcaccgccgaagcgaccggagttcccggcagaaggccggtgacgatgactcggctatggatggggcctctttgatcgggtcacaagacagccacgctgatgctgaaccccagcagacgacgcgtggaacgtatgcgtcttgaaaccaacaggccgctacactcggcctgaaatcccgtggtgggactcctccacgttcacgcggaggaggaggtcaatttgccgatcttgtttgcacgcattcagtgagacaatgcgagaaaccgcccggttgcagtccaaactacgagaaggtcgatacaatagcgagcgtatccggcggttgtaccggaaacagactcgtcgtcacgacacacccgaggagcactgtgtcatgacctgctggaacaacctgtacgccgagggtatcaacatcgtgtatatcggtgacttgaccgacgtgctggatacgcactggtcggtcgaaagcaacgccaagacccagaacttttgggcgctcaagaagtttcagtcgatcacatcgaaagctcacaaacccttccagtagaagttgaatctgtgtctacggtgcctggccagttctcgaagtgagacggacagtgagttttggcggtgaggagtcgctgtcggcggcggatcgccgccgacgcgacagtgtcgccactcacgcccgctgtcctagctgggacaactacctgaagaaccggtcgtcaagtggttggttcgctggaacagacctgcggacaccaagtgccgtccaagctgcgcgaagcgtcatttcgcagaactcggtgaacgaccactgtaagaggcggcgccccccgcggcggggcgccgccagactgcacatcctctccaagcagacgcttactctaacccgatgtgatcgactgagtttacagcggtagcgaggcgaaagcccatcggctttagccgtgggatgaagccgacaactgggaatctatccacgcttgtagccacgactggggttagatgtttgcgtaacatctttagctgagtgatatctatatactgacgatgcctcgtgggttcgacagggaacgtaccagcgtccacaaactccagtaccacttcatctggtgtccgaaataccgtaaatcggtgcttgagggcgaggtacgtacccgcctcggggaactcatcgaagagaaagccgacgagttcgggcaggtcaagggctactcctcacgccgacttcgggacgagttcgacttcggtttgccgtcgctgtggacgcgctcgtacttcgtctcaagtgcgggcgacgtatccagcgaagtcatcgaggagtacatcgacgcccaagcaggtgagtagccatgaaacggaacgtctcaaccacggttcgggccaaactccactcactgacaaacagaaagactgatctgctcgcccgtgagtatgaggcgttccagactgaggtacacggtggagacgctgacctgtactctgcaaccgaccagcaggcggccttgggcaagttcttgaaaccgctgtccgaggcgggggctgtactggcacagtccgaaacgcaggtcatcgtccaacgcgacgacgaacctgcgaacctctctgtttccgtggattcaacccccagcgggggaaccccacggctttagccgtgtggaggatgtcagaagcggtctaggagaatgccccggggcttgaccccggggttgaatccgataagcaggagtacaaatcattaagtgaacatatcccgaatcaagagacagcgatggagtacagtcaccgctaccccgcgtacccaacacaagaggtggcggctgaactggaacgacacatcgacgctcatcgccaagcgtacaactacaccctgtacaagtacgagaacgtggacgccgacaatatcggttccgcgtacaaa

SEQ ID NO: 819 - DNA, 1561 bp, Unknown
  Description of Unknown: lab enrichment-defined media-aerobic enrichment media sequence
accctgagcctaggcgtcgtcggcgtgatcgccggcccgctcgccatcgccctgctcgtcgaagtggtcgaactgatcaccgacgaacgggtcagcatccagcagaccttccaggagagcgccaccgaggccgccggcgacgacgactgagcggcggccgtaccgacgcgagtgcgggcggcgttacagcggtagcgaggcgaaagctcacccgtttacgggtgggatgaagccgacaattgggaatctatccacgttcgtagccgcggctggggttggatacttgcataacatctttaggtgaatagtatctatatactgacgatgcctcgtgggttcgacagggaacgtaccagcgtccacaaactccagtatcacttcatttggtgtccgaagtaccgcaaatcggtgcttgagggtgaggtacgtgaccgtctcgaagaactcattgaggagaaaggagacgaactcggccaggtcaagggctactcctcgcgccacctccgcgacgagttcgacttcggtcttccctcgctgtggacgcgctcgtacttcgtctcaactgcgggcgacgtatccagcgaagtcatcgaggagtacatcgacgcccaagcaggtgagtagtcttgcaacaaaccgtctcgaccacggtgcgggtcaaactcccctcgctgaccaacaggaaggcagacctgctcgcccgtgagtacgaggcgttccagaccgaagttcacggcggcgatgctgacctctactccgcgactaagcaacaggcggccttgggcaagttctcgaaaccgctgtccgaggcgggggctgtactggcacagtccgaaacgcaggtcatcgtccaccgtgacgaggaacctgcgaacctctccgtatccgtggattcaacccccagtgggggaaccccacggctttagccgtgggaggatgtcagtcgcccgtctcgggttcgcgccccgcggccttccactcggtcagactcccctcgtagaaggcgaggttctcgtacccgaggtgtcggaggacgacgtaggtgtgactgatccggcgagcggtgttgcagtacagcagaacgcgccgggtcgctgagcgggatattctcactctccgcaccgcccgcgagaatagggccgcgctcagtcgaccacgcaagcgcgagcgcgcctcgccctttcagtccaccaggaccgcaccgctccgccccgcaccgccaccgcagacagcctcacacctccccagcctcctcgcgtctcgtcgctcgcgtgactcgctcctcggtgctcgtccctcgcacggtgcgtcgcggcacggaggccgcgacggcgcgcgccaccgcaatcgatcggtgtcggaacggccgcgaacgcacctctcaagagcctgcgggccgtggcgatcggtaatgagcgacaccggcggcccactctcaccggacagaccggacgccgagagcgatttccgggtggacgcccccttcgaccccgcgggcgaccagcccgaggccatcgagcaactggtcgacggcttcgaacgccagggccacgacaaacag

SEQ ID NO: 820 - DNA, 506 bp, Unknown
  Description of Unknown: salt lake metagenome sequence
atggtcacggttcggatcaatgaagtcaccaagtcaaagctcgacaagttgtgcgaggacaacggcctcaagatgcggtgggttgttgaacaggcgatccttcaatattgtgagatgcacgagtcgaaacatcgtccagaggatgggtaacttatgtcactcaaaacactcacattctggccgattggtatgtctgcaaaatacaggcggatatttgacaacatccgtaagcaacttggggcggcgcagcgcgaaatggtgaaagcatggctacggctggcgttggcagaggatgcttatggtgaccttaatgctgcgaataacatcgcgcgggggatgcagacgtttgggccttgtgccaagtcctctgcgtcagacgacgctatcgggctgcggttcgatagcgaggggcaagaatctgccctggggcaggcgaagcgattgtttgcttgagcttgcaagttcttgtgtgtgtgtgggtatgaactgctgagcgtttgtgtagt

SEQ ID NO: 821 - DNA, 1915 bp, Unknown
  Description of Unknown: aquatic-thermal springs-sediment sequence
gtcgtaacgatggctgatgtgttagagggaggggctgtggggatcaatgacaataaaatgaacactctcgtattaatgcatgctaacccactatggggcgagattgagataaaaactcccgcagggcgaacggtttggcgtgctccttaaccgttggtgacctgaatgtgggaaacaatcttgattggcgtttgtggggcgcactttcccgctaccgtaggggcgacaaaaagcagcactattctggctttccgtcgccatcatcgctatcatcgctctcatagccatcaacactttgaccgtccgctggctcggtcatccgccacaaaactcatccacaacaatagcactgtcagagtgaaaggacttagcagcgttcgttaaagcgccgacctgcagcgccgaaagacacttgctaagccttaccgtcggcttggtcacttcccgtttcccgtagcgcgtgaagccagaatggtaaagcctaaaatgccgtttttgcgttgcgacaacgcgcaagttagcgtcagcaggcgcacataggcacaggcgcacgggcgtaggcacgcaggcgcacgcacgcgggcacgggcgcgctttcaacggggatacccgagcgcgcaggcgggtcaggctgcccgccgaccttaaagtcaaccttaaagactacaacccccaaaccgacgctatgtgcgctatgctttgggacgcttataaagttcaggtgcttaaggaacttgttggcgaggatgagggcgactacattaagtaaagccgtgaggagttattagaggctttgcgggaacgggagcacaagtatggttataaagcgccccttaatgcgaacttaacaaaaccgtcccgaccagttatttcgggtaaaattttaacccatttgcccaaattccgcaacttcgttgcagcaaacctccagtcacccctttcccctaaggggtttggcgcaagcaattcttgaaattcctgccaaaatcggcaaaattcaaaggtcccgttctttgatgcctatcacggcagaataaagggggaggttgacggcaaatgaaaaaagtggtcataaccatcactactggagtagagtttctacaacctcaagatgagcaaatcgtgaggaaggcagcggaatggtatacaaaggcacgagaagccctttttgcccatgccctccaacaacaacaaggtaaagttgagggaaaccgattttgttgcacaaagtgtaaatttcagcacaatgcggactttgtggcggcgtataacattgccgtaagggcattgaagaagttagggatgagggaagagataggttggaaggtattgacaggcaagccgaaggtgttataatgacgatggctcatggggagcaggctccccatgggcagcgtgcccgccgaaaggtgggtggagggcagagcctgtctgcctgtaagcagcaccttcccacatggggaggttgtctgcaagttcacattatcccctgaccccagcggtgaagagccgctggggtttcaattgtcttagcaccctgatgtccacattaaccccttaagacagaaaacttgcccaagcgaggattagcacgaactattgccttgtaacgctccccttagcagttgcacattgcaaagcaagtttcttggcattaagagactctttcagtcccacaatggtttgattgctacattgcctgccaagataaagcccttcctttccattatcacttgtaaaggaccagtgtcataattcctcaggggtgagggagatgaaggtcattattgggcgtgtaatggaagacacttacacggtcaaaagtcaagaacccttgccaccaggacaggaagtcttcattgtaactaagatggacgctgaggatgtctattaccttgcaaaaactttggcgtgg

SEQ ID NO: 822 - DNA, 13 bp, Artificial Sequence
  Description of Artificial Sequence: Synthetic oligonucleotide
  modified_base (6)..(6): a, c, t, or g
  modified_base (10)..(11): a, c, t, or g
gyyygnkrknnac

SEQ ID NO: 823 - DNA, 16 bp, Artificial Sequence
  Description of Artificial Sequence: Synthetic oligonucleotide
  modified_base (13)..(13): a, c, t, or g
yccrcgcgcgcgnggg

SEQ ID NO: 824 - DNA, 12 bp, Artificial Sequence
  Description of Artificial Sequence: Synthetic oligonucleotide
  modified_base (4)..(4): a, c, t, or g
rbbnrbkgacas

SEQ ID NO: 825 - DNA, 37 bp, Artificial Sequence
  Description of Artificial Sequence: Synthetic oligonucleotide
  modified_base (6)..(6): a, c, t, or g
gkykknrcygmyswcgwtygygggrskkgtkymaaag

SEQ ID NO: 826 - DNA, 108 bp, Artificial Sequence
  Description of Artificial Sequence: Synthetic polynucleotide
  modified_base (38)..(71): a, c, t, g, unknown or other
ctctgacgcgctgacgttcgcggggttggtttcaaagnnnnnnnnnnnnnnnnnnnnnnnnnnnnnnnnnnctctgacgcgctgacgttcgcggggttggtttcaaag

SEQ ID NO: 827 - DNA, 33 bp, Artificial Sequence
  Description of Artificial Sequence: Synthetic oligonucleotide
  modified_base (30)..(30): a, c, t, or g
cgycgyrcbbyccrcgcgcgcgsgggvbgndkg

SEQ ID NO: 828 - DNA, 34 bp, Artificial Sequence
  Description of Artificial Sequence: Synthetic oligonucleotide
cgtcgcacctcgcgcgcgcgtaggagatggtttg

SEQ ID NO: 829 - DNA, 92 bp, Artificial Sequence
  Description of Artificial Sequence: Synthetic oligonucleotide
  modified_base (27)..(66): a, c, t, g, unknown or other
ctctccacgcgcgcgcgggatgcgggnnnnnnnnnnnnnnnnnnnnnnnnnnnnnnnnnnnnnnnnctctccacgcgcgcgcgggatgcggg

SEQ ID NO: 830 - DNA, 40 bp, Artificial Sequence
  Description of Artificial Sequence: Synthetic oligonucleotide
  modified_base (10)..(13): a, c, t, or g
  modified_base (24)..(24): a, c, t, or g
gsygbygyrnnnnsybhsvvvdhnvhdrbbrrykgacaca

SEQ ID NO: 831 - DNA, 106 bp, Artificial Sequence
  Description of Artificial Sequence: Synthetic polynucleotide
  modified_base (37)..(70): a, c, t, g, unknown or other
gtgcatcggccgacgaagagcgaaggtcagtgacagnnnnnnnnnnnnnnnnnnnnnnnnnnnnnnnnnngtgcatcggccgacgaagagcgaaggtcagtgacag

SEQ ID NO: 832 - DNA, 13 bp, Artificial Sequence
  Description of Artificial Sequence: Synthetic oligonucleotide
  Description of Combined DNA/RNA Molecule: Synthetic oligonucleotide
  modified_base (6)..(6): a, c, t, g or u
  modified_base (10)..(11): a, c, t, g or u
gyyygnkrknnac

SEQ ID NO: 833 - DNA, 16 bp, Artificial Sequence
  Description of Artificial Sequence: Synthetic oligonucleotide
  Description of Combined DNA/RNA Molecule: Synthetic oligonucleotide
  modified_base (13)..(13): a, c, t, g or u
yccrcgcgcgcgnggg

SEQ ID NO: 834 - DNA, 12 bp, Artificial Sequence
  Description of Artificial Sequence: Synthetic oligonucleotide
  Description of Combined DNA/RNA Molecule: Synthetic oligonucleotide
  modified_base (4)..(4): a, c, t, g or u
rbbnrbkgacas
